(19) United States
(12) Patent Application Publication
(10) Pub. No.: US 2020/0376022 A1
(43) Pub. Date: Dec. 3, 2020

(54) OLIGONUCLEOTIDE PROBES AND USES THEREOF

(71) Applicant: Caris Science, Inc., Irving, TX (US)

(72) Inventors: Valeriy Domenyuk, Phoenix, AZ (US); Xianghua Liu, Chandler, AZ (US); Mark Miglarese, Phoenix, AZ (US); David Spetzler, Paradise Valley, AZ (US)

(73) Assignee: Caris Science, Inc., Irving, TX (US)

(21) Appl. No.: 16/497,024

(22) PCT Filed: Mar. 27, 2018
(86) PCT No.: PCT/US2018/024666

§ 371 Date: Sep. 24, 2019

Related U.S. Application Data
(60) Provisional application No. 62/484,272, filed on Apr. 11, 2017.
(60) Provisional application No. 62/477,870, filed on Mar. 28, 2017.
(60) Provisional application No. 62/477,096, filed on Mar. 27, 2017.

(51) Int. Cl. A61K 31/7125; C12Q 1/6811; C12Q 1/6886

(52) U.S. Cl. CPC A61K 31/7125; C12Q 1/6811; A61K 45/06; C12Q 2600/112; C12Q 1/6886

(57) ABSTRACT

Methods and compositions are provided for oligonucleotides that bind targets of interest. The targets include circulating biomarkers such as micro vesicles, including those derived from various diseases.

### CROSS-REFERENCE

[0001] This application claims the benefit of U.S. Provisional Patent Application Nos. 62/477,096, filed Mar. 27, 2017; 62/477,870, filed Mar. 28, 2017; and 62/484,272, filed Apr. 11, 2017; all of which applications are incorporated herein by reference in their entirety.

### SEQUENCE LISTING SUBMITTED VIA EFS-WEB

[0002] The entire content of the following electronic submission of the sequence listing via the USPTO EFS-WEB server, as authorized and set forth in MPEP § 1730 II.B.2(a), is incorporated herein by reference in its entirety for all purposes. The sequence listing is within the electronically filed text file that is identified as follows:

[0003] File Name: 37901830602SeqList.txt

[0004] Date of Creation: Mar. 27, 2018

[0005] Size (bytes): 2,728,920 bytes

### BACKGROUND OF THE INVENTION

[0006] The invention relates generally to the field of aptamers capable of binding to microvesicle surface antigens, which are useful as therapeutics in and diagnostics of cancer and/or other diseases or disorders in which microvesicles implicated. The invention further relates to materials and methods for the administration of aptamers capable of binding to microvesicles. The microvesicles may be derived from cells indicative of cancer, including without limitation a breast cancer.

[0007] Aptamers are oligomeric nucleic acid molecules having specific binding affinity to molecules, which may be through interactions other than classic Watson-Crick base pairing. Unless otherwise specified, an “aptamer” as the term is used herein can refer to nucleic acid molecules that can be used to characterize a phenotype, regardless of manner of target recognition. Unless other specified, the terms “aptamer,” “oligonucleotide,” “oligonucleotide probe,” “polynucleotide,” or the like may be used interchangeably herein.

[0008] Aptamers, like peptides generated by phage display or monoclonal antibodies (“mAbs”), are capable of specifically binding to selected targets and modulating the target's activity, e.g., through binding aptamers may block their target's ability to function. Created by an in vitro selection process from pools of random sequence oligonucleotides, aptamers have been generated for over 100 proteins including growth factors, transcription factors, enzymes, immunoglobulins, and receptors. A typical aptamer is 10-15 kDa in size (30-45 nucleotides), binds its target with sub-nanomolar affinity, and discriminates against closely related targets (e.g., aptamers will typically not bind other proteins from the same gene family). A series of structural studies have shown that aptamers are capable of using the same types of binding interactions (e.g., hydrogen bonding, electrostatic complementarity, hydrophobic contacts, steric exclusion) that drive affinity and specificity in antibody-antigen complexes.

[0009] Aptamers have a number of desirable characteristics for use as therapeutics and diagnostics including high specificity and affinity, biological efficacy, and excellent pharmacokinetic properties. In addition, they offer specific competitive advantages over antibodies and other protein biologics, for example:

[0010] Speed and control. Aptamers are produced by an entirely in vitro process, allowing for the rapid generation of initial leads, including therapeutic leads. In vitro selection allows the specificity and affinity of the aptamer to be tightly controlled and allows the generation of leads, including leads against both toxic and non-immunogenic targets.

[0011] Toxicity and Immunogenicity. Aptamers as a class have demonstrated little or no toxicity or immunogenicity. In chronic dosing of rats or woodchucks with high levels of aptamer (10 mg/kg daily for 90 days), no toxicity is observed by any clinical, cellular, or biochemical measure. Whereas the efficacy of many monoclonal antibodies can be severely limited by immune response to antibodies themselves, it is extremely difficult to elicit antibodies to aptamers most likely because aptamers cannot be presented by T-cells via the MHC and the immune response is generally trained not to recognize nucleic acid fragments.

[0012] Administration. Whereas most currently approved antibody therapeutics are administered by intravenous infusion (typically over 2-4 hours), aptamers can be administered by subcutaneous injection (aptamer bioavailability via subcutaneous administration is >80% in monkey studies (Tucker et al., J. Chromatography B. 732: 203-212, 1999)). This difference is primarily due to the comparatively low solubility and thus large volumes necessary for most therapeutic mAbs. With good solubility (>150 mg/mL) and comparatively low molecular weight (aptamer: 10-50 kDa; antibody: 150 kDa), a weekly dose of aptamer may be delivered by injection in a volume of less than 0.5 mL. In addition, the small size of aptamers allows them to penetrate into areas of conformational constrictions that do not allow for antibodies or antibody fragments to penetrate, presenting yet another advantage of aptamer-based therapeutics or prophylaxis.

[0013] Scalability and cost. Aptamers are chemically synthesized and are readily scaled as needed to meet production demand for diagnostic or therapeutic applications. Whereas difficulties in scaling production are currently limiting the availability of some biologics and the capital cost of a large-scale protein production plant is enormous, a single large-scale oligonucleotide synthesizer can produce upwards of 100 kg/year and requires a relatively modest initial investment. The current cost of goods for aptamer synthesis at the kilogram scale is estimated at $100/g, comparable to that for highly optimized antibodies.

[0014] Stability. Aptamers are chemically robust. They are intrinsically adapted to regain activity following exposure to factors such as heat and denaturants and can be stored for extended periods (>1 yr) at room temperature as lyophilized powders.

### INCORPORATION BY REFERENCE

[0015] All publications, patents and patent applications mentioned in this specification are herein incorporated by reference to the same extent as if each individual publication, patent or patent application was specifically and individually indicated to be incorporated by reference.

### SUMMARY OF THE INVENTION

[0016] Compositions and methods of the invention provide aptamers that bind biomarkers of interest such as microvesicle surface antigens or functional fragments of microvesicle surface antigens. In various embodiments, oligonucleotide probes of the invention are used in diagnostic, prognostic or theranostic processes to screen a biological sample for the presence or levels of biomarkers, including without limitation microvesicle surface antigens, determined to provide a relevant readout. The diagnosis may be related to a cancer, e.g., a breast cancer or a prostate cancer. In other embodiments, oligonucleotide probes of the invention are chemically modified or composed in a pharmaceutical composition for therapeutic applications.

[0017] In an aspect, the invention provides an oligonucleotide comprising a sequence according to any one of SEQ ID NOs 4151-14156. In a related aspect, the invention provides an oligonucleotide comprising a sequence according to any sequence in Table 44. In another related aspect, the invention provides an oligonucleotide consisting of a sequence according to any sequence in Table 44. The oligonucleotide can further comprise a 5′ region and/or a 3′ region flanking the sequence according to any sequence in Table 44. In a related aspect, the invention provides an oligonucleotide comprising a sequence according to any one of the SEQ ID NOs 4151-14156 or Table 44 and further having a 5′ region with sequence 5′-CTAGCATGACTGCAGTACGT (SEQ ID NO. 131) and/or a 3′ region with sequence 5′-CTGTCTCTTATACACATCTGACGCTGCCGACGA (SEQ ID NO. 132). In a related aspect, the invention provides an oligonucleotide comprising a nucleic acid sequence or a portion thereof that is at least 50, 55, 60, 65, 70, 75, 80, 85, 90, 95, 96, 97, 98, 99 or 100 percent homologous to an oligonucleotide sequence above.

[0018] In an aspect, the invention provides a plurality of oligonucleotides comprising at least 1, 2, 3, 4, 5, 6, 7, 8, 9, 10, 11, 12, 13, 14, 15, 16, 17, 18, 19, 20, 25, 30, 40, 45, 50, 55, 60, 65, 70, 75, 80, 85, 90, 95, 100, 125, 150, 175, 200, 300, 400, 500, 600, 700, 800, 900, 1000, 2000, 3000, 4000, 5000, 6000, 7000, 8000, 9000, or at least 10000 different oligonucleotide sequences provided by the invention, such as those above.

[0019] In some embodiments, the oligonucleotide or members of the plurality of oligonucleotides comprise a DNA, RNA, 2′-O-methyl backbone, phosphorothioate backbone, or any combination thereof. In some embodiments, the oligonucleotide or members of the plurality of oligonucleotides comprise at least one of DNA, RNA, PNA, LNA, UNA, and any combination thereof. In some embodiments, the oligonucleotide or members of the plurality of oligonucleotides comprise at least one functional modification selected from the group consisting of biotinylation, a non-naturally occurring nucleotide, a deletion, an insertion, an addition, and a chemical modification. For example, the chemical modification can be at least one of C18, polyethylene glycol (PEG), PEG4, PEG6, PEG8, PEG12, and an SM(PEG)n crosslinker. In some embodiments, the oligonucleotide or members of the plurality of oligonucleotides are labeled. For example, the oligonucleotide or members of the plurality of oligonucleotides can be attached to a nanoparticle, liposome, gold, magnetic label, fluorescent label, light emitting particle, or radioactive label.

[0020] In an aspect, the invention provides a method of enriching an oligonucleotide library comprising a plurality of oligonucleotides, the method comprising: (a) performing at least one round of positive selection, wherein the positive selection comprises: (i) contacting at least one sample with the plurality of oligonucleotides, wherein the at least one sample is from a single patient; and (ii) recovering members of the plurality of oligonucleotides that associated with the at least one sample; and (b) optionally performing at least one round of negative selection, wherein the negative selection comprises: (i) contacting at least one additional sample with the plurality of oligonucleotides, wherein at least one additional sample is from an additional single patient; and (ii) recovering members of the plurality of oligonucleotides that did not associate with the at least one additional sample; and (c) amplifying the members of the plurality of oligonucleotides recovered in at least one or step (a)(ii) and step (b)(ii), thereby enriching the oligonucleotide library. In some embodiments, the recovered members of the plurality of oligonucleotides in step (a)(ii) are used as the input for the next iteration of step (a)(i). In some embodiments, the recovered members of the plurality of oligonucleotides in step (b)(ii) are used as the input for the next iteration of step (a)(i). In some embodiments, the at least one sample is at least 2, 3, 4, 5, 6, 7, 8, 9, 10, 11, 12, 13, 14, 15, 16, 17, 18, 19, 20, 25, 30, 40, 45, 50, 55, 60, 65, 70, 75, 80, 85, 90, 95, or 100 samples. In some embodiments, the at least one additional sample is at least 2, 3, 4, 5, 6, 7, 8, 9, 10, 11, 12, 13, 14, 15, 16, 17, 18, 19, 20, 25, 30, 40, 45, 50, 55, 60, 65, 70, 75, 80, 85, 90, 95, or 100 samples. In some embodiments, the unenriched oligonucleotide library comprises at least 2, 3, 4, 5, 6, 7, 8, 9, 10, 11, 12, 13, 14, 15, 16, 17, 18, 19, 20, 25, 30, 40, 45, 50, 55, 60, 65, 70, 75, 80, 85, 90, 95, 100, 125, 150, 175, 200, 300, 400, 500, 600, 700, 800, 900, 1000, 2000, 3000, 4000, 5000, 6000, 7000, 8000, 9000, 10000, 20000, 30000, 40000, 50000, 60000, 70000, 80000, 90000, 100000, 200000, 300000, 400000, 500000, 10⁶, 10⁷, 10⁸, 10⁹, 10¹⁰, 10¹¹, 10¹², 10¹³, 10¹⁴, 10¹⁵, 10¹⁶, 10¹⁷, or at least 10¹⁸ different oligonucleotide sequences. The unenriched oligonucleotide library can comprise a naïve F-Trin library. In some embodiments, the at least one sample is from a same single patient in multiple iterations of positive selection. In some embodiments, the at least one sample is from a same single patient in at least one repetition of positive selection and is from a different single patient in at least one other iteration of positive selection. In some embodiments, the at least one additional sample is from a same additional single patient in multiple iterations of negative selection. In some embodiments, the at least one additional sample is from a same additional single patient in at least one repetition of negative selection and is from a different additional single patient in other at least one iteration of negative selection.

[0021] In a related aspect, the invention provides a method of detecting a target in a sample comprising: (a) contacting the sample with at least one oligonucleotide or plurality of oligonucleotides according to the invention, e.g., according to any one of SEQ ID NOs. 4151-14156 or otherwise enriched via the method above; and (b) identifying a presence or level of a complex formed between the at least one oligonucleotide or plurality of oligonucleotides and the sample. In some embodiments, the presence or level is used to characterize a phenotype. In some embodiments, the identifying comprises sequencing, amplification, hybridization, gel electrophoresis or chromatography. For example, the identifying by hybridization may comprise contacting the sample with at least one labeled probe that is configured to hybridize with at least one oligonucleotide. The at least one labeled probe can be directly or indirectly attached to a label. For example, the label may comprise a fluorescent or magnetic label. As another example, the sequencing may comprise next generation sequencing, dye termination sequencing, and/or pyrosequencing. The at least one oligonucleotide comprises an oligonucleotide or plurality of oligonucleotides provided by the invention, e.g., as described above. The at least one oligonucleotide may comprise an oligonucleotide or plurality of oligonucleotides from a library enriched according to the methods of the invention described above. The phenotype can be a disease or disorder. In such cases, the characterizing may comprise a diagnosis, prognosis and/or theranosis for the disease or disorder. For example, the theranosis may be predicting a treatment efficacy or lack thereof, or monitoring a treatment efficacy. In some embodiments, the complex formed between the at least one oligonucleotide or plurality of oligonucleotides and the sample comprises a complex formed between a microvesicle population in the sample and the at least one oligonucleotide or plurality of oligonucleotides. The microvesicle population can be isolated before or after the contacting using affinity purification, filtration, polymer precipitation, PEG precipitation, F68 ultracentrifugation, a molecular crowding reagent, affinity isolation, affinity selection, or any useful combination thereof. In some embodiments, the characterizing comprises comparing the presence or level to a reference. The reference can be the presence or level determined in a sample from an individual without a disease or disorder, or from an individual with a different state of a disease or disorder. In some embodiments, the comparison to the reference of at least one oligonucleotide comprising at least one sequence provided by the invention indicates that the sample comprises a cancer sample or a non-cancer/normal sample. See, e.g., Example 35 herein. In some embodiments, the sample comprises a bodily fluid, tissue sample or cell culture. The bodily fluid can be peripheral blood, sera, plasma, ascites, urine, cerebrospinal fluid (CSF), sputum, saliva, bone marrow, synovial fluid, aqueous humor, amniotic fluid, cerumen, breast milk, broncheoalveolar lavage fluid, semen, prostatic fluid, cowper's fluid or pre-ejaculatory fluid, female ejaculate, sweat, fecal matter, hair oil, tears, cyst fluid, pleural and peritoneal fluid, pericardial fluid, lymph, chyme, chyle, bile, interstitial fluid, menses, pus, sebum, vomit, vaginal secretions, mucosal secretion, stool water, pancreatic juice, lavage fluids from sinus cavities, bronchopulmonary aspirates, blastocyl cavity fluid, umbilical cord blood, or any useful combination thereof. In some embodiments, the sample is from a subject suspected of having or being predisposed to a disease or disorder. The disease or disorder may comprise a cancer, a premalignant condition, an inflammatory disease, an immune disease, an autoimmune disease or disorder, a cardiovascular disease or disorder, neurological disease or disorder, infectious disease or pain. For example, the cancer may comprise a breast cancer. In some embodiments, the breast cancer comprises a lobular, ductal or triple negative breast cancer. In some embodiments, the cancer comprises a lobular breast cancer.

[0022] In a related aspect, the invention provides a kit comprising a reagent for carrying out the enrichment or detection/characterization methods of the invention. Similarly, the invention provides use of a reagent for carrying out the enrichment or detection/characterization methods of the invention. The reagent comprises an oligonucleotide or a plurality of oligonucleotides provided by the invention, such as described above.

[0023] In an aspect, the invention provides a method of imaging at least one cell or tissue, comprising contacting the at least one cell or tissue with at least one oligonucleotide or plurality of oligonucleotides according to the invention, such as described above, and detecting the at least one oligonucleotide or the plurality of oligonucleotides in contact with at least one cell or tissue. In some embodiments, the at least one oligonucleotide or the plurality of oligonucleotides is labeled, e.g., using a nanoparticle, liposome, gold, magnetic label, fluorescent label, light emitting particle, radioactive label, or any useful combination thereof. In some embodiments, the at least one oligonucleotide or the plurality of oligonucleotides is administered to a subject prior to the detecting. The at least one cell or tissue can be from a subject suspected of having or being predisposed to a disease or disorder. The at least one cell or tissue may comprise neoplastic, malignant, tumor, hyperplastic, or dysplastic cells. For example, the at least one cell or tissue may comprise lymphoma, leukemia, renal carcinoma, sarcoma, hemangiopericytoma, melanoma, abdominal cancer, gastric cancer, colon cancer, cervical cancer, prostate cancer, pancreatic cancer, breast cancer, or non-small cell lung cancer cells. For example, the cell or tissue may comprise a breast cancer. In some embodiments, the breast cancer comprises a lobular, ductal or triple negative breast cancer. In some embodiments, the breast cancer comprises a lobular breast cancer.

[0024] In an aspect, the invention provides a pharmaceutical composition comprising a therapeutically effective amount of the at least one oligonucleotide or the plurality of oligonucleotides according to the invention, such as described above, or a salt thereof, and a pharmaceutically acceptable carrier, diluent, or both. In some embodiments, the at least one oligonucleotide or the plurality of oligonucleotides is attached to a toxin or chemotherapeutic agent. In some embodiments, the at least one oligonucleotide or the plurality of oligonucleotides is attached to a liposome or nanoparticle. For example, the liposome or nanoparticle may comprise a small molecule, drug, toxin or chemotherapeutic agent. In a related aspect, the invention provides a method of treating or ameliorating a disease or disorder in a subject in need thereof, comprising administering the composition to the subject. In another related aspect, the invention provides a method of inducing cytotoxicity in a subject, comprising administering the composition to the subject. In still another related aspect, the invention provides a method comprising detecting a transcript or protein in a biological sample from a subject, comparing a presence or level of the transcript to a reference, and administering the composition to the subject based on the comparison. In various embodiments, the administering comprises at least one of intradermal, intramuscular, intraperitoneal, intravenous, subcutaneous, intranasal, epidural, oral, sublingual, intracerebral, intravaginal, transdermal, rectal, by inhalation, topical administration, or any combination thereof.

[0025] In an aspect, the invention provides a nanoparticle conjugated to the at least one oligonucleotide or the plurality of oligonucleotides according to according to the invention, such as described above. In some embodiments, the nanoparticle comprises a small molecule, drug, toxin or chemotherapeutic agent. In some embodiments, the nanoparticle is ≤100 nm in diameter. In a related aspect, the invention provides a pharmaceutical composition comprising a therapeutically effective amount of the nanoparticle, and a pharmaceutically acceptable carrier, diluent, or both. In another related aspect, the invention provides a method of treating or ameliorating a disease or disorder in a subject in need thereof, comprising administering the pharmaceutical composition to the subject. In still another related aspect, the invention provides a method of inducing cytotoxicity in a subject, comprising administering the pharmaceutical composition to the subject. In an aspect, the invention provides a method comprising detecting a transcript or protein in a biological sample from a subject, comparing a presence or level of the transcript to a reference, and administering the pharmaceutical composition to the subject based on the comparison. In various embodiments, the administering comprises at least one of intradermal, intramuscular, intraperitoneal, intravenous, subcutaneous, intranasal, epidural, oral, sublingual, intracerebral, intravaginal, transdermal, rectal, by inhalation, topical administration, or any combination thereof.

[0026] In an aspect, the invention provides a method of characterizing a phenotype in a sample comprising: (a) detecting at least one microRNA in the sample, wherein the at least one microRNA is listed in Table 45 or Table 46; and (b) identifying a presence or level of the at least one the sample, wherein the presence or level is used to characterize the phenotype. See, e.g., Example 36. In some embodiments, the at least one microRNA comprises at least 1, 2, 3, 4, 5, 6, 7, 8, 9, or 10 microRNA listed in Table 45. In some embodiments, the at least one microRNA comprises at least 1, 2, 3, 4, 5, 6, 7, 8, 9, or 10 microRNA listed in Table 46. In some embodiments, the identifying comprises sequencing, amplification, hybridization, gel electrophoresis or chromatography. In some embodiments, the at least one microRNA comprises miR-1299. In some embodiments, the at least one microRNA is isolated from a protein complex, wherein optionally the protein complex comprises an Argonaut protein, Ago2 Ago1, Ago3, Ago4, or GW182. For example, the protein complex may comprise Ago2. In some embodiments, the phenotype comprises a disease or disorder. In such cases, the characterizing can include providing a diagnosis, prognosis and/or theranosis for the disease or disorder. The theranosis can be predicting a treatment efficacy or lack thereof, or monitoring a treatment efficacy. In some embodiments, the at least one microRNA is associated with a microvesicle population. The microvesicle population can be isolated from the sample using affinity purification, filtration, polymer precipitation, PEG precipitation, F68, ultracentrifugation, a molecular crowding reagent, affinity isolation, affinity selection, or any combination thereof. In some embodiments, the characterizing comprises comparing the presence or level to a reference. For example, the reference may comprise the presence or level determined in a sample from an individual without a disease or disorder, or from an individual with a different state of a disease or disorder. In some embodiments, the sample comprises a bodily fluid, tissue sample or cell culture. For example, the bodily fluid may comprise peripheral blood, sera, plasma, ascites, urine, cerebrospinal fluid (CSF), sputum, saliva, bone marrow, synovial fluid, aqueous humor, amniotic fluid, cerumen, breast milk, broncheoalveolar lavage fluid, semen, prostatic fluid, cowper's fluid or pre-ejaculatory fluid, female ejaculate, sweat, fecal matter, hair oil, tears, cyst fluid, pleural and peritoneal fluid, pericardial fluid, lymph, chyme, chyle, bile, interstitial fluid, menses, pus, sebum, vomit, vaginal secretions, mucosal secretion, stool water, pancreatic juice, lavage fluids from sinus cavities, bronchopulmonary aspirates, blastocyl cavity fluid, or umbilical cord blood. In some embodiments, the the sample is from a subject suspected of having or being predisposed to a disease or disorder.

[0027] In a related aspect, the invention provides a kit comprising a reagent for carrying out the characterizing methods above. Similarly, the invention provides use of a reagent for carrying out the characterizing. In some embodiments, the reagent comprises at least one of a primer configured to amplify a small RNA, such as selected from Table 45 or Table 46, a binding agent to Ago2, a reagent for isolating microvesicles, and any useful combination thereof.

[0028] As noted above, various embodiments of the compositions and methods of the invention relate to medical conditions such as diseases or disorders. In some embodiments, the disease or disorder may comprise a cancer, a premalignant condition, an inflammatory disease, an immune disease, an autoimmune disease or disorder, a cardiovascular disease or disorder, neurological disease or disorder, infectious disease or pain. The cancer may comprise an acute lymphoblastic leukemia; acute myeloid leukemia; adrenocortical carcinoma; AIDS-related cancers; AIDS-related lymphoma; anal cancer; appendix cancer; astrocytomas; atypical teratoid/rhabdoid tumor; basal cell carcinoma; bladder cancer; brain stem glioma; brain tumor (including brain stem glioma, central nervous system atypical teratoid/rhabdoid tumor, central nervous system embryonal tumors, astrocytomas, craniopharyngioma, ependymoblastoma, ependymoma, medulloblastoma, medulloepithelioma, pineal parenchymal tumors of intermediate differentiation, supratentorial primitive neuroectodermal tumors and pineoblastoma); breast cancer; bronchial tumors; Burkitt lymphoma; cancer of unknown primary site; carcinoid tumor; carcinoma of unknown primary site; central nervous system atypical teratoid/rhabdoid tumor; central nervous system embryonal tumors; cervical cancer; childhood cancers; chordoma; chronic lymphocytic leukemia; chronic myelogenous leukemia; chronic myeloproliferative disorders; colon cancer; colorectal cancer; craniopharyngioma; cutaneous T-cell lymphoma; endocrine pancreas islet cell tumors; endometrial cancer; ependymoblastoma; ependymoma; esophageal cancer; esthesioneuroblastoma; Ewing sarcoma; extracranial germ cell tumor; extragonadal germ cell tumor; extrahepatic bile duct cancer; gallbladder cancer; gastric (stomach) cancer; gastrointestinal carcinoid tumor; gastrointestinal stromal cell tumor; gastrointestinal stromal tumor (GIST); gestational trophoblastic tumor; glioma; hairy cell leukemia; head and neck cancer; heart cancer; Hodgkin lymphoma; hypopharyngeal cancer; intraocular melanoma; islet cell tumors; Kaposi sarcoma; kidney cancer; Langerhans cell histiocytosis; laryngeal cancer; lip cancer; liver cancer; lung cancer; malignant fibrous histiocytoma bone cancer; medulloblastoma; medulloepithelioma; melanoma; Merkel cell carcinoma; Merkel cell skin carcinoma; mesothelioma; metastatic squamous neck cancer with occult primary; mouth cancer; multiple endocrine neoplasia syndromes; multiple myeloma; multiple myeloma/plasma cell neoplasm; mycosis fungoides; myelodysplastic syndromes; myeloproliferative neoplasms; nasal cavity cancer; nasopharyngeal cancer; neuroblastoma; Non-Hodgkin lymphoma; nonmelanoma skin cancer; non-small cell lung cancer; oral cancer; oral cavity cancer; oropharyngeal cancer; osteosarcoma; other brain and spinal cord tumors; ovarian cancer; ovarian epithelial cancer; ovarian germ cell tumor; ovarian low malignant potential tumor; pancreatic cancer; papillomatosis; paranasal sinus cancer; parathyroid cancer; pelvic cancer; penile cancer; pharyngeal cancer; pineal parenchymal tumors of intermediate differentiation; pineoblastoma; pituitary tumor; plasma cell neoplasm/multiple myeloma; pleuropulmonary blastoma; primary central nervous system (CNS) lymphoma; primary hepatocellular liver cancer; prostate cancer; rectal cancer; renal cancer; renal cell (kidney) cancer; renal cell cancer; respiratory tract cancer; retinoblastoma; rhabdomyosarcoma; salivary gland cancer; Sézary syndrome; small cell lung cancer; small intestine cancer; soft tissue sarcoma; squamous cell carcinoma; squamous neck cancer; stomach (gastric) cancer; supratentorial primitive neuroectodermal tumors; T-cell lymphoma; testicular cancer; throat cancer; thymic carcinoma; thymoma; thyroid cancer; transitional cell cancer; transitional cell cancer of the renal pelvis and ureter; trophoblastic tumor; ureter cancer; urethral cancer; uterine cancer; uterine sarcoma; vaginal cancer; vulvar cancer; Waldenström macroglobulinemia; or Wilm's tumor. In some embodiments, the cancer comprises a breast cancer, wherein optionally the breast cancer comprises a lobular, ductal or triple negative breast cancer. The cancer can be a lobular breast cancer. In some embodiments, the cancer comprises a prostate cancer. See, e.g., Examples 35-36. In embodiments, the premalignant condition comprises Barrett's Esophagus. In some embodiments, the autoimmune disease comprises inflammatory bowel disease (IBD), Crohn's disease (CD), ulcerative colitis (UC), pelvic inflammation, vasculitis, psoriasis, diabetes, autoimmune hepatitis, multiple sclerosis, myasthenia gravis, Type I diabetes, rheumatoid arthritis, psoriasis, systemic lupus erythematosis (SLE), Hashimoto's Thyroiditis, Grave's disease, Ankylosing Spondylitis Sjogrens Disease, CREST syndrome, Scleroderma, Rheumatic Disease, organ rejection, Primary Sclerosing Cholangitis, or sepsis. In some embodiments, the cardiovascular disease comprises atherosclerosis, congestive heart failure, vulnerable plaque, stroke, ischemia, high blood pressure, stenosis, vessel occlusion or a thrombotic event. In some embodiments, the neurological disease comprises Multiple Sclerosis (MS), Parkinson's Disease (PD), Alzheimer's Disease (AD), schizophrenia, bipolar disorder, depression, autism, Prion Disease, Pick's disease, dementia, Huntington disease (HD), Down's syndrome, cerebrovascular disease, Rasmussen's encephalitis, viral meningitis, neurospsychiatric systemic lupus erythematosus (NPSLE), amyotrophic lateral sclerosis, Creutzfeldt-Jacob disease, Gerstmann-Straussler-Scheinker disease, transmissible spongiform encephalopathy, ischemic reperfusion damage (e.g. stroke), brain trauma, microbial infection, or chronic fatigue syndrome. In some embodiments, the pain comprises fibromyalgia, chronic neuropathic pain, or peripheral neuropathic pain. In some embodiments, the infectious disease comprises a bacterial infection, viral infection, yeast infection, Whipple's Disease, Prion Disease, cirrhosis, methicillin-resistant Staphylococcus aureus, HIV, HCV, hepatitis, syphilis, meningitis, malaria, tuberculosis, influenza.

### BRIEF DESCRIPTION OF THE DRAWINGS

[0029] FIG. 1 illustrates a competitive assay selection strategy: the random pool of aptamer (the library) is incubated with the target protein, in this case, EpCAM. After washing and elution from the target, the eluted aptamers are again added to the target and allowed to bind. The antibody is then added to the reaction, competing with the aptamers at the epitope of the antibody. The aptamers displaced by the antibody are then collected.

[0030] FIGS. 2A-2F illustrate methods of assessing biomarkers such as microvesicle surface antigens. FIG. 2A is a schematic of a planar substrate coated with a capture agent, such as an aptamer or antibody, which captures vesicles expressing the target antigen of the capture agent. The capture agent may bind a protein expressed on the surface of vesicles shed from diseased cells (“disease vesicle”). The detection agent, which may also be an aptamer or antibody, carries a detectable label, here a fluorescent signal. The detection agent binds to the captured vesicle and provides a detectable signal via its fluorescent label. The detection agent can detect an antigen that is generally associated with vesicles, or is associated with a cell-of-origin or a disease, e.g., a cancer. FIG. 2B is a schematic of a particle bead conjugated with a capture agent, which captures vesicles expressing the target antigen of the capture agent. The capture agent may bind a protein expressed on the surface of vesicles shed from diseased cells (“disease vesicle”). The detection agent, which may also be an aptamer or antibody, carries a detectable label, here a fluorescent signal. The detection agent binds to the captured vesicle and provides a detectable signal via its fluorescent label. The detection agent can detect an antigen that is generally associated with vesicles, or is associated with a cell-of-origin or a disease, e.g., a cancer. FIG. 2C is an example of a screening scheme that can be performed by using different combinations of capture and detection agents to the indicated biomarkers. The biomarker combinations can be detected using assays as shown in FIGS. 2A-2B. FIGS. 2D-2E present illustrative schemes for capturing and detecting vesicles to characterize a phenotype. FIG. 2F presents illustrative schemes for assessing vesicle payload to characterize a phenotype.

[0031] FIGS. 3A-B illustrates a non-limiting example of an aptamer nucleotide sequence and its secondary structure. FIG. 3A illustrates a secondary structure of a 32-mer oligonucleotide, Aptamer 4, with sequence 5′-CCCCCCGAATCACATGACTTGGGCGGGGGTCG (SEQ ID NO. 1). In the figure, the sequence is shown with 6 thymine nucleotides added to the end, which can act as a spacer to attach a biotin molecule. This particular oligo has a high binding affinity to the target, EpCAM (see Table 5). Additional candidate EpCAM binders are identified by modeling the entire database of sequenced oligos to the secondary structure of this oligo. FIG. 3B illustrates another 32-mer oligo with sequence 5′-ACCGGATAGCGGTTGGAGGCGTGCTCCACTCG (SEQ ID NO. 2) that has a different secondary structure than the aptamer in FIG. 3A. This aptamer is also shown with a 6-thymine tail.

[0032] FIG. 4 illustrates a process for producing a target-specific set of aptamers using a cell subtraction method, wherein the target is a biomarker associated with a specific disease. In Step 1, a random pool of oligonucleotides are contacted with a biological sample from a normal patient. In Step 2, the oligos that did not bind in Step 1 are added to a biological sample isolated from diseased patients. The bound oligos from this step are then eluted, captured via their biotin linkage and then combined again with normal biological sample. The unbound oligos are then added again to disease-derived biological sample and isolated. This process can be repeated iteratively. The final eluted aptamers are tested against patient samples to measure the sensitivity and specificity of the set. Biological samples can include blood, including plasma or serum, or other components of the circulatory system, such as microvesicles.

[0033] FIG. 5 illustrates results from a binding assay showing the binding affinity of an exemplary aptamer (Aptamer ID BTX176881 (SEQ ID NO: 3)) to the target EpCAM protein at various target concentrations. The aptamer to be tested is fixed to a substrate using a biotin tail and is incubated with various concentrations of target (125, 250 and 500 nM). The test is performed on a surface plasmon resonance machine (SPR). The SPR machine detects association and disassociation of the aptamer and the target. Target is applied until the association and disassociation events are equal, resulting in a plateau of the curve. The equations describing the curve at each concentration can then be used to calculate the K_{D} of the aptamer (see Table 5).

[0034] FIGS. 6A-D illustrate the use of an anti-EpCAM aptamer (Aptamer 4; SEQ ID NO. 1) to detect a microvesicle population. Vesicles in patient plasma samples were captured using bead-conjugated antibodies to the indicated microvesicle surface antigens: A) EGFR; B) PBP; C) EpCAM; D) KLK2. Fluorescently labeled Aptamer 4 was used as a detector in the microbead assay. The figure shows average median fluorescence values (MFI values) for three cancer (C1-C3) and three normal samples (N1-N3) in each plot. In each plot, the samples from left to right are ordered as: C1, C2, C3, N1, N2, N3.

[0035] FIG. 7A illustrates the sequence of EPCAM aptamer CAR003 (SEQ ID NO. 4). FIG. 7B illustrates the optimal secondary structure of CAR003 with a minimum free energy (AG) of −30.00 kcal/mol. For purposes of illustration, the aptamer is shown as an RNA aptamer (SEQ ID NO. 5) corresponding to the DNA sequence in FIG. 7A. FIG. 7C illustrates aptamer pool purification. The figure comprises an FPLC chromatogram with all product and fractions assigned in pools after checking quality on gel. FIG. 7D illustrates a SYBR GOLD stained gel with different FPLC fractions of CAR003 aptamer after synthesis. Different fractions were combined in pools based on amount of un-finished chains in order high to low (pool 1-pool 3). The pools 1-3 correspond to those indicated in FIG. 7C. FIG. 7E-F illustrate binding of CAR003 to EPCAM protein in 25 mM HEPES with PBS-BN (FIG. 7E) or in 25 mM HEPES with 1 mM MgCl₂(FIG. 7F). FIG. 7G illustrates CAR003 binding to EpCAM in the indicated salts with and without addition of bovine serum albumin (BSA). FIG. 7H illustrates the effect of denaturing on CAR003 binding to EPCAM protein. In each group of four bars, the aptamer is from left to right: Aptamer 4, CAR003 Pool 1, CAR003 Pool 2, CAR003 Pool 3. FIG. 7I illustrates titration of aptamers against EPCAM recombinant protein (constant input 5 μg). FIG. 7J illustrates a Western blot with CAR003 aptamer versus EPCAM his-tagged protein, BSA, and HSA (5 μg each). The gel was blocked 0.5% F127 and probed with 50 μg/ml CAR003 biotinylated aptamer, fraction 3. The blot was visualized with NeutrAvidin-HRP followed by SuperSignal West Femto Chemiluminescent Substrate.

[0036] FIGS. 8A-8D illustrates methods to attach microvesicles to a substrate. FIG. 8A illustrates direct conjugation of a carboxylated microsphere to a vesicle surface antigen. FIG. 8B illustrates anchoring of a microvesicle to a microsphere via a biotin functionalized lipid anchor. FIG. 8C illustrates antibody binding to a vesicle surface antigen, wherein the antibody is conjugated to a carboxylated microsphere. FIG. 8D illustrates aptamer binding to a vesicle surface antigen, wherein the aptamer is conjugated to a carboxylated microsphere.

[0037] FIG. 9 comprises a schematic for identifying a target of a selected aptamer, such as an aptamer selected by the process of the invention. The figure shows a binding agent 902, here an aptamer for purposes of illustration, tethered to a substrate 901. The binding agent 902 can be covalently attached to substrate 901. The binding agent 902 may also be non-covalently attached. For example, binding agent 902 can comprise a label which can be attracted to the substrate, such as a biotin group which can form a complex with an avidin/streptavidin molecule that is covalently attached to the substrate. The binding agent 902 binds to a surface antigen 903 of microvesicle 904. In the step signified by arrow (i), the microvesicle is disrupted while leaving the complex between the binding agent 902 and surface antigen 903 intact. Disrupted microvesicle 905 is removed, e.g., via washing or buffer exchange, in the step signified by arrow (ii). In the step signified by arrow (iii), the surface antigen 903 is released from the binding agent 902. The surface antigen 903 can be analyzed to determine its identity.

[0038] FIGS. 10A-10C illustrate binding of selected aptamers against microbeads conjugated to various input sample. The aptamers were selected from an aptamer library as binding to microbeads conjugated to breast cancer-derived microvesicles. Experimental details are in the Examples herein. Each plot shows a different aptamer. The Y-axis indicates level of binding. In each group of samples, binding of 9 purified aptamer candidates is shown. The input sample is indicated on the X axis from left to right as follows: 1) Cancer Exosome: aptamer binding to microbeads conjugated to microvesicles isolated from plasma samples from breast cancer patients; 2) Cancer Non-exosome: aptamer binding to microbeads conjugated to plasma samples from breast cancer patients after removal of microvesicles by ultracentrifugation; 3) Non-Cancer Exosome: aptamer binding to microbeads conjugated to microvesicles isolated from plasma samples from normal (i.e., non-breast cancer) patients; 4) Non-Cancer Non-Exosome: aptamer binding to microbeads conjugated to plasma samples from breast cancer patients after removal of microvesicles by ultracentrifugation.

[0039] FIGS. 11A-11B illustrate enriching a naïve aptamer library for aptamers that differentiate between breast cancer and non-cancer microvesicles in plasma samples.

[0040] FIGS. 12A-12G illustrate using an oligonucleotide probe library to differentiate cancer and non-cancer samples.

[0041] FIG. 13 shows protein targets of oligonucleotide probes run on a silver stained SDS-PAGE gel.

[0042] FIGS. 14A-G illustrate use of oligonucleotides that differentiate microvesicles in breast cancer plasma from normal controls.

[0043] FIG. 15 shows a heatmap of clusters of oligonucleotides enriched against aggressive versus non-aggressive breast cancer plains samples.

[0044] FIGS. 16A-B illustrate a model generated using a training (FIG. 16A) and test (FIG. 16B) set from a round of cross validation. The AUC for the test set was 0.803. Another exemplary round of cross-validation is shown in FIGS. 16C-D with training (FIG. 16C) and test (FIG. 16D) sets. The AUC for the test set was 0.678.

[0045] FIGS. 17A-E show a photo-cleavable Biotin mediated purification of an oligonucleotide library.

[0046] FIGS. 18A-C illustrate SUPRA (SsDNA by Unequal length PRimer Asymmetric PCR), a protocol for single stranded DNA (ssDNA) oligonucleotide library preparation.

[0047] FIGS. 19A-C illustrate use of aptamers in methods of characterizing a phenotype. FIG. 19A is a schematic 1900 showing an assay configuration that can be used to detect and/or quantify a target of interest. In the figure, capture aptamer 1902 is attached to substrate 1901. Target of interest 1903 is bound by capture aptamer 1902. Detection aptamer 1904 is also bound to target of interest 1903. Detection aptamer 1904 carries label 1905 which can be detected to identify target captured to substrate 1901 via capture aptamer 1902. FIG. 19B is a schematic 1910 showing use of an aptamer pool to characterize a phenotype. A pool of aptamers to a target of interest is provided 1911. The pool is contacted with a test sample to be characterized 1912. The mixture is washed to remove unbound aptamers. The remaining aptamers are disassociated and collected 1913. The collected aptamers are identified 1914 and the identity of the retained aptamers is used to characterize the phenotype 1915. FIG. 19C is a schematic 1920 showing an implementation of the method in FIG. 19B. A pool of aptamers identified as binding a microvesicle population is provided 1919. The input sample comprises microvesicles that are isolated from a test sample 1920. The pool is contacted with the isolated microvesicles to be characterized 1923. The mixture is washed to remove unbound aptamers and the remaining aptamers are disassociated and collected 1925. The collected aptamers are identified and the identity of the retained aptamers is used to characterize the phenotype 1926.

[0048] FIGS. 20A-I illustrate development and use of an oligonucleotide probe library to distinguish biological sample types.

[0049] FIGS. 21A-C illustrate enriching a naïve oligonucleotide library with balanced design for oligonucleotides that differentiate between breast cancer and non-cancer microvesicles derived from plasma samples.

[0050] FIGS. 22A-D shows characterization of breast cancer samples as cancer or non-cancer using two different but related oligonucleotide probe libraries.

[0051] FIGS. 23A-J shows development of oligonucleotide probe libraries to detect breast cancer in plasma samples.

[0052] FIGS. 24A-E show identification of small RNAs associated with prostate cancer.

### DETAILED DESCRIPTION OF THE INVENTION

[0053] The details of one or more embodiments of the invention are set forth in the accompanying description below. Although any methods and materials similar or equivalent to those described herein can be used in the practice or testing of the present invention, the preferred methods and materials are now described. Other features, objects, and advantages of the invention will be apparent from the description. In the specification, the singular forms also include the plural unless the context clearly dictates otherwise. Unless defined otherwise, all technical and scientific terms used herein have the same meaning as commonly understood by one of ordinary skill in the art to which this invention belongs. In the case of conflict, the present Specification will control.

[0054] Disclosed herein are compositions and methods that can be used to assess a biomarker profile, which can include a presence or level of one or more biomarkers. The compositions and methods of the invention comprise the use of oligonucleotide probes (aptamers) that bind microvesicle surface antigens or a functional fragment thereof. The antigens typically comprise proteins or polypeptides but can be any useful component displayed on a microvesicle surface including nucleic acids, lipids and/or carbohydrates. In general, the oligonucleotides disclosed are synthetic nucleic acid molecules, including DNA and RNA, and variations thereof. Unless otherwise specified, the oligonucleotide probes can be synthesized in DNA or RNA format or as hybrid molecules as desired. The methods disclosed comprise diagnostic processes and techniques using one or more aptamer of the invention, to determine the level or presence of relevant microvesicle surface antigens or a functional fragment thereof. Alternatively, an oligonucleotide probe of the invention can also be used as a binding agent to capture, isolate, or enrich, a cell, cell fragment, vesicle or any other fragment or complex that comprises the antigen or functional fragments thereof.

[0055] The compositions and methods of the invention comprise individual oligonucleotides that are identified for use in assessing a biomarker profile. The invention further discloses compositions and methods of oligonucleotide pools that can be used to detect a biomarker profile in a given sample.

[0056] Oligonucleotide probes and sequences disclosed in the compositions and methods of the invention may be identified herein in the form of DNA or RNA. Unless otherwise specified, one of skill in the art will appreciate that an oligonucleotide may generally be synthesized as either form of nucleic acid and carry various chemical modifications and remain within the scope of the invention. The term aptamer may be used in the art to refer to a single oligonucleotide that binds specifically to a target of interest through mechanisms other than Watson crick base pairing, similar to binding of a monoclonal antibody to a particular antigen. Within the scope of this disclosure and unless stated explicitly or otherwise implicit in context, the terms aptamer, oligonucleotide and oligonucleotide probe, and variations thereof, may be used interchangeably to refer to an oligonucleotide capable of distinguishing biological entities of interest (e.g, biomarkers) whether or not the specific entity has been identified or whether the precise mode of binding has been determined.

[0057] An oligonucleotide probe of the invention can also be used to provide in vitro or in vivo detection or imaging, to provide any appropriate diagnostic readout (e.g., diagnostic, prognostic or theranostic).

[0058] Separately, an oligonucleotide probe of the invention can also be used for treatment or as a therapeutic to specifically target a cell, tissue or organ.

### Aptamers

[0059] SELEX. A suitable method for generating an aptamer is with the process entitled “Systematic Evolution of Ligands by Exponential Enrichment” (“SELEX”) generally described in, e.g., U.S. patent application Ser. No. 07/536,428, filed Jun. 11, 1990, now abandoned, U.S. Pat. No. 5,475,096 entitled “Nucleic Acid Ligands”, and U.S. Pat. No. 5,270,163 (see also WO 91/19813) entitled “Nucleic Acid Ligands”. Each SELEX-identified nucleic acid ligand, i.e., each aptamer, is a specific ligand of a given target compound or molecule. The SELEX process is based on the unique insight that nucleic acids have sufficient capacity for forming a variety of two- and three-dimensional structures and sufficient chemical versatility available within their monomers to act as ligands (i.e., form specific binding pairs) with virtually any chemical compound, whether monomeric or polymeric. Molecules of any size or composition can serve as targets.

[0060] SELEX relies as a starting point upon a large library or pool of single stranded oligonucleotides comprising randomized sequences. The oligonucleotides can be modified or unmodified DNA, RNA, or DNA/RNA hybrids. In some examples, the pool comprises 100% random or partially random oligonucleotides. In other examples, the pool comprises random or partially random oligonucleotides containing at least one fixed and/or conserved sequence incorporated within randomized sequence. In other examples, the pool comprises random or partially random oligonucleotides containing at least one fixed and/or conserved sequence at its 5′ and/or 3′ end which may comprise a sequence shared by all the molecules of the oligonucleotide pool. Fixed sequences are sequences such as hybridization sites for PCR primers, promoter sequences for RNA polymerases (e.g., T3, T4, T7, and SP6), restriction sites, or homopolymeric sequences, such as poly A or poly T tracts, catalytic cores, sites for selective binding to affinity columns, and other sequences to facilitate cloning and/or sequencing of an oligonucleotide of interest. Conserved sequences are sequences, other than the previously described fixed sequences, shared by a number of aptamers that bind to the same target.

[0061] The oligonucleotides of the pool preferably include a randomized sequence portion as well as fixed sequences necessary for efficient amplification. Typically the oligonucleotides of the starting pool contain fixed 5′ and 3′ terminal sequences which flank an internal region of 30-50 random nucleotides. The randomized nucleotides can be produced in a number of ways including chemical synthesis and size selection from randomly cleaved cellular nucleic acids. Sequence variation in test nucleic acids can also be introduced or increased by mutagenesis before or during the selection/amplification iterations.

[0062] The random sequence portion of the oligonucleotide can be of any length and can comprise ribonucleotides and/or deoxyribonucleotides and can include modified or non-natural nucleotides or nucleotide analogs. See, e.g. U.S. Pat. Nos. 5,958,691; 5,660,985; 5,958,691; 5,698,687; 5,817,635; 5,672,695, and PCT Publication WO 92/07065. Random oligonucleotides can be synthesized from phosphodiester-linked nucleotides using solid phase oligonucleotide synthesis techniques well known in the art. See, e.g., Froehler et al., Nucl. Acid Res. 14:5399-5467 (1986) and Froehler et al., Tet. Lett. 27:5575-5578 (1986). Random oligonucleotides can also be synthesized using solution phase methods such as triester synthesis methods. See, e.g., Sood et al., Nucl. Acid Res. 4:2557 (1977) and Hirose et al., Tet. Lett., 28:2449 (1978). Typical syntheses carried out on automated DNA synthesis equipment yield 10⁴-10¹⁶ individual molecules, a number sufficient for most SELEX experiments. Sufficiently large regions of random sequence in the sequence design increases the likelihood that each synthesized molecule is likely to represent a unique sequence.

[0063] The starting library of oligonucleotides may be generated by automated chemical synthesis on a DNA synthesizer. To synthesize randomized sequences, mixtures of all four nucleotides are added at each nucleotide addition step during the synthesis process, allowing for random incorporation of nucleotides. As stated above, in one embodiment, random oligonucleotides comprise entirely random sequences; however, in other embodiments, random oligonucleotides can comprise stretches of nonrandom or partially random sequences. Partially random sequences can be created by adding the four nucleotides in different molar ratios at each addition step.

[0064] The starting library of oligonucleotides may be for example, RNA, DNA, or RNA/DNA hybrid. In those instances where an RNA library is to be used as the starting library it is typically generated by transcribing a DNA library in vitro using T7 RNA polymerase or modified T7 RNA polymerases and purified. The library is then mixed with the target under conditions favorable for binding and subjected to step-wise iterations of binding, partitioning and amplification, using the same general selection scheme, to achieve virtually any desired criterion of binding affinity and selectivity. More specifically, starting with a mixture containing the starting pool of nucleic acids, the SELEX method includes steps of: (a) contacting the mixture with the target under conditions favorable for binding; (b) partitioning unbound nucleic acids from those nucleic acids which have bound specifically to target molecules; (c) dissociating the nucleic acid-target complexes; (d) amplifying the nucleic acids dissociated from the nucleic acid-target complexes to yield a ligand-enriched mixture of nucleic acids; and (e) reiterating the steps of binding, partitioning, dissociating and amplifying through as many cycles as desired to yield highly specific, high affinity nucleic acid ligands to the target molecule. In those instances where RNA aptamers are being selected, the SELEX method further comprises the steps of: (i) reverse transcribing the nucleic acids dissociated from the nucleic acid-target complexes before amplification in step (d); and (ii) transcribing the amplified nucleic acids from step (d) before restarting the process.

[0065] Within a nucleic acid mixture containing a large number of possible sequences and structures, there is a wide range of binding affinities for a given target. A nucleic acid mixture comprising, for example, a 20 nucleotide randomized segment can have 4²⁰ candidate possibilities. Those which have the higher affinity constants for the target are most likely to bind to the target. After partitioning, dissociation and amplification, a second nucleic acid mixture is generated, enriched for the higher binding affinity candidates. Additional rounds of selection progressively favor better ligands until the resulting nucleic acid mixture is predominantly composed of only one or a few sequences. These can then be cloned, sequenced and individually tested for binding affinity as pure ligands or aptamers.

[0066] Cycles of selection and amplification are repeated until a desired goal is achieved. In the most general case, selection/amplification is continued until no significant improvement in binding strength is achieved on repetition of the cycle. The method is typically used to sample approximately 10¹⁴ different nucleic acid species but may be used to sample as many as about 10¹⁸ different nucleic acid species. Generally, nucleic acid aptamer molecules are selected in a 5 to 20 cycle procedure. In one embodiment, heterogeneity is introduced only in the initial selection stages and does not occur throughout the replicating process.

[0067] In one embodiment of SELEX, the selection process is so efficient at isolating those nucleic acid ligands that bind most strongly to the selected target, that only one cycle of selection and amplification is required. Such an efficient selection may occur, for example, in a chromatographic-type process wherein the ability of nucleic acids to associate with targets bound on a column operates in such a manner that the column is sufficiently able to allow separation and isolation of the highest affinity nucleic acid ligands.

[0068] In many cases, it is not necessarily desirable to perform the iterative steps of SELEX until a single nucleic acid ligand is identified. The target-specific nucleic acid ligand solution may include a family of nucleic acid structures or motifs that have a number of conserved sequences and a number of sequences which can be substituted or added without significantly affecting the affinity of the nucleic acid ligands to the target. By terminating the SELEX process prior to completion, it is possible to determine the sequence of a number of members of the nucleic acid ligand solution family. The invention provides for the identification of aptamer pools and uses thereof that jointly can be used to characterize a test sample. For example, the aptamer pools can be identified through rounds of positive and negative selection to identify microvesicle indicative of a disease or condition. The invention further provides use of such aptamer pools to detect and/or quantify such microvesicles in a sample, thereby allowing a diagnosis, prognosis or theranosis to be provided.

[0069] A variety of nucleic acid primary, secondary and tertiary structures are known to exist. The structures or motifs that have been shown most commonly to be involved in non-Watson-Crick type interactions are referred to as hairpin loops, symmetric and asymmetric bulges, pseudoknots and myriad combinations of the same. Almost all known cases of such motifs suggest that they can be formed in a nucleic acid sequence of no more than 30 nucleotides. For this reason, it is often preferred that SELEX procedures with contiguous randomized segments be initiated with nucleic acid sequences containing a randomized segment of between about 20 to about 50 nucleotides and in some embodiments, about 30 to about 40 nucleotides. In one example, the 5′-fixed:random:3′-fixed sequence comprises a random sequence of about 30 to about 50 nucleotides.

[0070] The core SELEX method has been modified to achieve a number of specific objectives. For example, U.S. Pat. No. 5,707,796 describes the use of SELEX in conjunction with gel electrophoresis to select nucleic acid molecules with specific structural characteristics, such as bent DNA. U.S. Pat. No. 5,763,177 describes SELEX based methods for selecting nucleic acid ligands containing photoreactive groups capable of binding and/or photocrosslinking to and/or photoinactivating a target molecule. U.S. Pat. Nos. 5,567,588 and 5,861,254 describe SELEX based methods which achieve highly efficient partitioning between oligonucleotides having high and low affinity for a target molecule. U.S. Pat. No. 5,496,938 describes methods for obtaining improved nucleic acid ligands after the SELEX process has been performed. U.S. Pat. No. 5,705,337 describes methods for covalently linking a ligand to its target.

[0071] SELEX can also be used to obtain nucleic acid ligands that bind to more than one site on the target molecule, and to obtain nucleic acid ligands that include non-nucleic acid species that bind to specific sites on the target. SELEX provides means for isolating and identifying nucleic acid ligands which bind to any envisionable target, including large and small biomolecules such as nucleic acid-binding proteins and proteins not known to bind nucleic acids as part of their biological function as well as lipids, cofactors and other small molecules. For example, U.S. Pat. No. 5,580,737 discloses nucleic acid sequences identified through SELEX which are capable of binding with high affinity to caffeine and the closely related analog, theophylline.

[0072] Counter-SELEX is a method for improving the specificity of nucleic acid ligands to a target molecule by eliminating nucleic acid ligand sequences with cross-reactivity to one or more non-target molecules. Counter-SELEX is comprised of the steps of (a) preparing a candidate mixture of nucleic acids; (b) contacting the candidate mixture with the target, wherein nucleic acids having an increased affinity to the target relative to the candidate mixture may be partitioned from the remainder of the candidate mixture; (c) partitioning the increased affinity nucleic acids from the remainder of the candidate mixture; (d) dissociating the increased affinity nucleic acids from the target; e) contacting the increased affinity nucleic acids with one or more non-target molecules such that nucleic acid ligands with specific affinity for the non-target molecule(s) are removed; and (f) amplifying the nucleic acids with specific affinity only to the target molecule to yield a mixture of nucleic acids enriched for nucleic acid sequences with a relatively higher affinity and specificity for binding to the target molecule. As described above for SELEX, cycles of selection and amplification are repeated until a desired goal is achieved.

[0073] One potential problem encountered in the use of nucleic acids as therapeutics and vaccines is that oligonucleotides in their phosphodiester form may be quickly degraded in body fluids by intracellular and extracellular enzymes such as endonucleases and exonucleases before the desired effect is manifest. The SELEX method thus encompasses the identification of high-affinity nucleic acid ligands containing modified nucleotides conferring improved characteristics on the ligand, such as improved in vivo stability or improved delivery characteristics. Examples of such modifications include chemical substitutions at the ribose and/or phosphate and/or base positions. SELEX identified nucleic acid ligands containing modified nucleotides are described, e.g., in U.S. Pat. No. 5,660,985, which describes oligonucleotides containing nucleotide derivatives chemically modified at the 2′ position of ribose, 5′ position of pyrimidines, and 8′ position of purines, U.S. Pat. No. 5,756,703 which describes oligonucleotides containing various 2′-modified pyrimidines, and U.S. Pat. No. 5,580,737 which describes highly specific nucleic acid ligands containing one or more nucleotides modified with 2′-amino (2′—NH₂), 2′-fluoro (2′-F), and/or 2′-O-methyl (2′-OMe) substituents.

[0074] Modifications of the nucleic acid ligands contemplated in this invention include, but are not limited to, those which provide other chemical groups that incorporate additional charge, polarizability, hydrophobicity, hydrogen bonding, electrostatic interaction, and fluxionality to the nucleic acid ligand bases or to the nucleic acid ligand as a whole. Modifications to generate oligonucleotide populations which are resistant to nucleases can also include one or more substitute internucleotide linkages, altered sugars, altered bases, or combinations thereof. Such modifications include, but are not limited to, 2′-position sugar modifications, 5-position pyrimidine modifications, 8-position purine modifications, modifications at exocyclic amines, substitution of 4-thiouridine, substitution of 5-bromo or 5-iodo-uracil; backbone modifications, phosphorothioate or allyl phosphate modifications, methylations, and unusual base-pairing combinations such as the isobases isocytidine and isoguanosine. Modifications can also include 3′ and 5′ modifications such as capping.

[0075] In one embodiment, oligonucleotides are provided in which the P(O)O group is replaced by P(O)S (“thioate”), P(S)S (“dithioate”), P(O)NR₂ (“amidate”), P(O)R, P(O)OR′, CO or CH₂ (“formacetal”) or 3-amine (—NH—CH₂—CH₂—), wherein each R or R′ is independently H or substituted or unsubstituted alkyl. Linkage groups can be attached to adjacent nucleotides through an —O—, —N—, or —S— linkage. Not all linkages in the oligonucleotide are required to be identical. As used herein, the term phosphorothioate encompasses one or more non-bridging oxygen atoms in a phosphodiester bond replaced by one or more sulfur atoms.

[0076] In further embodiments, the oligonucleotides comprise modified sugar groups, for example, one or more of the hydroxyl groups is replaced with halogen, aliphatic groups, or functionalized as ethers or amines. In one embodiment, the 2-position of the furanose residue is substituted by any of an O-methyl, O-alkyl, O-allyl, S-alkyl, S-allyl, or halo group. Methods of synthesis of 2-modified sugars are described, e.g., in Sproat, et al., Nucl. Acid Res. 19:733-738 (1991); Cotten, et al., Nucl. Acid Res. 19:2629-2635 (1991); and Hobbs, et al., Biochemistry 12:5138-5145 (1973). Other modifications are known to one of ordinary skill in the art. Such modifications may be pre-SELEX process modifications or post-SELEX process modifications (modification of previously identified unmodified ligands) or may be made by incorporation into the SELEX process.

[0077] Pre-SELEX process modifications or those made by incorporation into the SELEX process yield nucleic acid ligands with both specificity for their SELEX target and improved stability, e.g., in vivo stability. Post-SELEX process modifications made to nucleic acid ligands may result in improved stability, e.g., in vivo stability without adversely affecting the binding capacity of the nucleic acid ligand.

[0078] The SELEX method encompasses combining selected oligonucleotides with other selected oligonucleotides and non-oligonucleotide functional units as described in U.S. Pat. Nos. 5,637,459 and 5,683,867. The SELEX method further encompasses combining selected nucleic acid ligands with lipophilic or non-immunogenic high molecular weight compounds in a diagnostic or therapeutic complex, as described, e.g., in U.S. Pat. Nos. 6,011,020, 6,051,698, and PCT Publication No. WO 98/18480. These patents and applications teach the combination of a broad array of shapes and other properties, with the efficient amplification and replication properties of oligonucleotides, and with the desirable properties of other molecules.

[0079] The identification of nucleic acid ligands to small, flexible peptides via the SELEX method has also been explored. Small peptides have flexible structures and usually exist in solution in an equilibrium of multiple conformers, and thus it was initially thought that binding affinities may be limited by the conformational entropy lost upon binding a flexible peptide. However, the feasibility of identifying nucleic acid ligands to small peptides in solution was demonstrated in U.S. Pat. No. 5,648,214. In this patent, high affinity RNA nucleic acid ligands to substance P, an 11 amino acid peptide, were identified.

[0080] The aptamers with specificity and binding affinity to the target(s) of the present invention can be selected by the SELEX N process as described herein. As part of the SELEX process, the sequences selected to bind to the target are then optionally minimized to determine the minimal sequence having the desired binding affinity. The selected sequences and/or the minimized sequences are optionally optimized by performing random or directed mutagenesis of the sequence to increase binding affinity or alternatively to determine which positions in the sequence are essential for binding activity. Additionally, selections can be performed with sequences incorporating modified nucleotides to stabilize the aptamer molecules against degradation in vivo.

[0081] 2′ Modified SELEX

[0082] For an aptamer to be suitable for use as a therapeutic, it is preferably inexpensive to synthesize, and safe and stable in vivo. Wild-type RNA and DNA aptamers are typically not stable is vivo because of their susceptibility to degradation by nucleases. Resistance to nuclease degradation can be greatly increased by the incorporation of modifying groups at the 2-position.

[0083] Fluoro and amino groups have been successfully incorporated into oligonucleotide pools from which aptamers have been subsequently selected. However, these modifications greatly increase the cost of synthesis of the resultant aptamer, and may introduce safety concerns in some cases because of the possibility that the modified nucleotides could be recycled into host DNA by degradation of the modified oligonucleotides and subsequent use of the nucleotides as substrates for DNA synthesis.

[0084] Aptamers that contain 2-O-methyl (“2′-OMe”) nucleotides, as provided herein, may overcome one or more potential drawbacks. Oligonucleotides containing 2′-OMe nucleotides are nuclease-resistant and inexpensive to synthesize. Although 2′-OMe nucleotides are ubiquitous in biological systems, natural polymerases do not accept 2′-OMe NTPs as substrates under physiological conditions, thus there are no safety concerns over the recycling of 2′-OMe nucleotides into host DNA. The SELEX method used to generate 2-modified aptamers is described, e.g., in U.S. Provisional Patent Application Ser. No. 60/430,761, filed Dec. 3, 2002, U.S. Provisional Patent Application Ser. No. 60/487,474, filed Jul. 15, 2003, U.S. Provisional Patent Application Ser. No. 60/517,039, filed Nov. 4, 2003, U.S. patent application Ser. No. 10/729,581, filed Dec. 3, 2003, and U.S. patent application Ser. No. 10/873,856, filed Jun. 21, 2004, entitled “Method for in vitro Selection of 2-O-methyl substituted Nucleic Acids”, each of which is herein incorporated by reference in its entirety.

### Methods

[0085] Biomarker Detection and Diagnostics

[0086] The aptamers of the invention can be used in various methods to assess presence or level of biomarkers in a biological sample, e.g., biological entities of interest such as proteins, nucleic acids, or microvesicles. The aptamer functions as a binding agent to assess presence or level of the cognate target molecule. Therefore, in various embodiments of the invention directed to diagnostics, prognostics or theranostics, one or more aptamers of the invention are configured in a ligand-target based assay, where one or more aptamer of the invention is contacted with a selected biological sample, where the or more aptamer associates with or binds to its target molecules. Aptamers of the invention are used to identify candidate biosignatures based on the biological samples assessed and biomarkers detected. In further embodiments, aptamers may themselves provide a biosignature for a particular condition or disease. A biosignature refers to a biomarker profile of a biological sample comprising a presence, level or other characteristic that can be assessed (including without limitation a sequence, mutation, rearrangement, translocation, deletion, epigenetic modification, methylation, post-translational modification, allele, activity, complex partners, stability, half life, and the like) of one or more biomarker of interest. Biosignatures can be used to evaluate diagnostic and/or prognostic criteria such as presence of disease, disease staging, disease monitoring, disease stratification, or surveillance for detection, metastasis or recurrence or progression of disease. For example, methods of the invention using aptamers against microvesicle surface antigen are useful for correlating a biosignature comprising microvesicle antigens to a selected condition or disease. A biosignature can also be used clinically in making decisions concerning treatment modalities including therapeutic intervention. A biosignature can further be used clinically to make treatment decisions, including whether to perform surgery or what treatment standards should be used along with surgery (e.g., either pre-surgery or post-surgery). As an illustrative example, a biosignature of circulating biomarkers that indicates an aggressive form of cancer may call for a more aggressive surgical procedure and/or more aggressive therapeutic regimen to treat the patient.

[0087] A biosignature can be used in any methods disclosed herein, e.g., to assess whether a subject is afflicted with disease, is at risk for developing disease or to assess the stage or progression of the disease. For example, a biosignature can be used to assess whether a subject has prostate cancer, colon cancer, or other cancer as described herein. Furthermore, a biosignature can be used to determine a stage of a disease or condition, such as colon cancer. The biosignature/biomarker profile comprising a microvesicle can include assessment of payload within the microvesicle. For example, one or more aptamer of the invention can be used to capture a microvesicle population, thereby providing readout of microvesicle antigens, and then the payload content within the captured microvesicles can be assessed, thereby providing further biomarker readout of the payload content.

[0088] A biosignature for characterizing a phenotype may comprise any number of useful criteria. As described further below, the term “phenotype” as used herein can mean any trait or characteristic that is attributed to a biosignature/biomarker profile. A phenotype can be detected or identified in part or in whole using the compositions and/or methods of the invention. In some embodiments, at least one criterion is used for each biomarker. In some embodiments, at least 1, 2, 3, 4, 5, 6, 7, 8, 9, 10, 15, 20, 30, 40, 50, 60, 70, 80, 90 or at least 100 criteria are used. For example, for the characterizing of a cancer, a number of different criteria can be used when the subject is diagnosed with a cancer: 1) if the amount of microRNA in a sample from a subject is higher than a reference value; 2) if the amount of a microRNA within cell type specific vesicles (i.e. vesicles derived from a specific tissue or organ) is higher than a reference value; or 3) if the amount of microRNA within vesicles with one or more cancer specific biomarkers is higher than a reference value. Similar rules can apply if the amount of microRNA is less than or the same as the reference. The method can further include a quality control measure, such that the results are provided for the subject if the samples meet the quality control measure. In some embodiments, if the criteria are met but the quality control is questionable, the subject is reassessed.

[0089] Theranostics

[0090] A biosignature can be used in therapy related diagnostics to provide tests useful to diagnose a disease or choose the correct treatment regimen, such as provide a theranosis. Theranostics includes diagnostic testing that provides the ability to affect therapy or treatment of a diseased state. Theranostics testing provides a theranosis in a similar manner that diagnostics or prognostic testing provides a diagnosis or prognosis, respectively. As used herein, theranostics encompasses any desired form of therapy related testing, including predictive medicine, personalized medicine, integrated medicine, pharmacodiagnostics and Dx/Rx partnering. Therapy related tests can be used to predict and assess drug response in individual subjects, i.e., to provide personalized medicine. Predicting a drug response can be determining whether a subject is a likely responder or a likely non-responder to a candidate therapeutic agent, e.g., before the subject has been exposed or otherwise treated with the treatment. Assessing a drug response can be monitoring a response to a drug, e.g., monitoring the subject's improvement or lack thereof over a time course after initiating the treatment. Therapy related tests are useful to select a subject for treatment who is particularly likely to benefit from the treatment or to provide an early and objective indication of treatment efficacy in an individual subject. Thus, a biosignature as disclosed herein may indicate that treatment should be altered to select a more promising treatment, thereby avoiding the great expense of delaying beneficial treatment and avoiding the financial and morbidity costs of administering an ineffective drug(s).

[0091] The compositions and methods of the invention can be used to identify or detect a biosignature associated with a variety of diseases and disorders, which include, but are not limited to cardiovascular disease, cancer, infectious diseases, sepsis, neurological diseases, central nervous system related diseases, endovascular related diseases, and autoimmune related diseases. Therapy related diagnostics (i.e., theranostics) are also useful in clinical diagnosis and management of many such diseases and disorders. Therapy related diagnostics also aid in the prediction of drug toxicity, drug resistance or drug response. Therapy related tests may be developed in any suitable diagnostic testing format, which include, but are not limited to, e.g., immunohistochemical tests, clinical chemistry, immunoassay, cell-based technologies, nucleic acid tests or body imaging methods. Therapy related tests can further include but are not limited to, testing that aids in the determination of therapy, testing that monitors for therapeutic toxicity, or response to therapy testing. Thus, a biosignature can be used to predict or monitor a subject's response to a treatment. A biosignature can be determined at different time points for a subject after initiating, removing, or altering a particular treatment.

[0092] In some embodiments, the compositions and methods of the invention provide for a determination or prediction as to whether a subject is responding to a treatment is made based on a change in the amount of one or more components of a biosignature (i.e., the microRNA, vesicles and/or biomarkers of interest), an amount of one or more components of a particular biosignature, or the biosignature detected for the components. In another embodiment, a subject's condition is monitored by determining a biosignature at different time points. The progression, regression, or recurrence of a condition is determined. Response to therapy can also be measured over a time course. Thus, the invention provides a method of monitoring a status of a disease or other medical condition in a subject, comprising isolating or detecting a biosignature from a biological sample from the subject, detecting the overall amount of the components of a particular biosignature, or detecting the biosignature of one or more components (such as the presence, absence, or expression level of a biomarker). The biosignatures are used to monitor the status of the disease or condition.

[0093] One or more novel biosignatures of a vesicle can also be identified. For example, one or more vesicles can be isolated from a subject that responds to a drug treatment or treatment regimen and compared to a reference, such as another subject that does not respond to the drug treatment or treatment regimen. Differences between the biosignatures can be determined and used to identify other subjects as responders or non-responders to a particular drug or treatment regimen.

[0094] In some embodiments, a biosignature is used to determine whether a particular disease or condition is resistant to a drug, in which case a physician need not waste valuable time with such drug treatment. To obtain early validation of a drug choice or treatment regimen, a biosignature is determined for a sample obtained from a subject. The biosignature is used to assess whether the particular subject's disease has the biomarker associated with drug resistance. Such a determination enables doctors to devote critical time as well as the patient's financial resources to effective treatments.

[0095] Biosignatures can be used in the theranosis of a cancer, such as identifying whether a subject suffering from cancer is a likely responder or non-responder to a particular cancer treatment. The subject methods can be used to theranose cancers including those listed herein, e.g., in the “Phenotypes” section below. These include without limitation lung cancer, non-small cell lung cancer small cell lung cancer (including small cell carcinoma (oat cell cancer), mixed small cell/large cell carcinoma, and combined small cell carcinoma), colon cancer, breast cancer, prostate cancer, liver cancer, pancreatic cancer, brain cancer, kidney cancer, ovarian cancer, stomach cancer, melanoma, bone cancer, gastric cancer, breast cancer, glioma, glioblastoma, hepatocellular carcinoma, papillary renal carcinoma, head and neck squamous cell carcinoma, leukemia, lymphoma, myeloma, or other solid tumors.

[0096] A biosignature of circulating biomarkers, including markers associated with a component present in a biological sample (e.g., cell, cell-fragment, cell-derived extracellular vesicle), in a sample from a subject suffering from a cancer can be used select a candidate treatment for the subject. The biosignature can be determined according to the methods of the invention presented herein. In some embodiments, the candidate treatment comprises a standard of care for the cancer. The treatment can be a cancer treatment such as radiation, surgery, chemotherapy or a combination thereof. The cancer treatment can be a therapeutic such as anti-cancer agents and chemotherapeutic regimens. Further drug associations and rules that are used in embodiments of the invention are found in PCT/US2007/69286, filed May 18, 2007; PCT/US2009/60630, filed Oct. 14, 2009; PCT/2010/000407, filed Feb. 11, 2010; PCT/US12/41393, filed Jun. 7, 2012; PCT/US2013/073184, filed Dec. 4, 2013; PCT/US2010/54366, filed Oct. 27, 2010; PCT/US11/67527, filed Dec. 28, 2011; PCT/US15/13618, filed Jan. 29, 2015; and PCT/US16/20657, filed Mar. 3, 2016.

### Biomarker Detection

[0097] The compositions and methods of the invention can be used to assess any useful biomarkers in a biological sample for charactering a phenotype associated with the sample. Such biomarkers include all sorts of biological entities such as proteins, nucleic acids, lipids, carbohydrates, complexes of any thereof, and microvesicles. Various molecules associated with a microvesicle surface or enclosed within the microvesicle (referred to herein as “payload”) can serve as biomarkers. The microvesicles themselves can also be used as biomarkers.

[0098] The aptamers of the invention can be used to assess levels or presence of a microvesicle population. See, e.g., FIGS. 19B-C. The aptamers of the invention can also be used to assess levels or presence of their specific target molecule. See, e.g., FIG. 19A. In addition, aptamers of the invention are used to capture or isolated a component present in a biological sample that has the aptamer's target molecule present. For example, if a given microvesicle surface antigen is present on a cell, cell fragment or cell-derived extracellular vesicle. A binding agent to the biomarker, including without limitation an aptamer provided by the invention, may be used to capture or isolate the cell, cell fragment or cell-derived extracellular vesicles. See, e.g., FIGS. 2A-B, 19A. Such captured or isolated entities may be further characterized to assess additional surface antigens or internal “payload” molecules present (i.e., nucleic acid molecules, lipids, sugars, polypeptides or functional fragments thereof, or anything else present in the cellular milieu that may be used as a biomarker), where one or more biomarkers provide a biosignature to assess a desired phenotype, such as disease or condition. See, e.g., FIG. 2F. Therefore, aptamers of the invention are used not only to assess one or more microvesicle surface antigen of interest but are also used to separate a component present in a biological sample, where the components themselves can be further assessed to identify a candidate biosignature.

[0099] The methods of the invention can comprise multiplex analysis of at least 2, 3, 4, 5, 6, 7, 8, 9, 10, 11, 12, 13, 14, 15, 16, 17, 18, 19, 20, 25, 50, 75 or 100 different biomarkers. For example, an assay of a heterogeneous population of vesicles can be performed with a plurality of particles that are differentially labeled. There can be at least 2, 3, 4, 5, 6, 7, 8, 9, 10, 11, 12, 13, 14, 15, 16, 17, 18, 19, 20, 25, 50, 75 or 100 differentially labeled particles. The particles may be externally labeled, such as with a tag, or they may be intrinsically labeled. Each differentially labeled particle can be coupled to a capture agent, such as a binding agent, for a vesicle, resulting in capture of a vesicle. The multiple capture agents can be selected to characterize a phenotype of interest, including capture agents against general vesicle biomarkers, cell-of-origin specific biomarkers, and disease biomarkers. One or more biomarkers of the captured vesicle can then be detected by a plurality of binding agents. The binding agent can be directly labeled to facilitate detection. Alternatively, the binding agent is labeled by a secondary agent. For example, the binding agent may be an antibody for a biomarker on the vesicle, wherein the binding agent is linked to biotin. A secondary agent comprises streptavidin linked to a reporter and can be added to detect the biomarker. In some embodiments, the captured vesicle is assayed for at least 2, 3, 4, 5, 6, 7, 8, 9, 10, 11, 12, 13, 14, 15, 16, 17, 18, 19, 20, 25, 50, 75 or 100 different biomarkers. For example, multiple detectors, i.e., detection of multiple biomarkers of a captured vesicle or population of vesicles, can increase the signal obtained, permitted increased sensitivity, specificity, or both, and the use of smaller amounts of samples. Detection can be with more than one biomarker, including without limitation more than one vesicle marker such as in any of Tables 3-4, and Tables 18-25.

[0100] An immunoassay based method (e.g., sandwich assay) can be used to detect a biomarker of a vesicle. An example includes ELISA. A binding agent can be bound to a well. For example, a binding agent such as an aptamer or antibody to an antigen of a vesicle can be attached to a well. A biomarker on the captured vesicle can be detected based on the methods described herein. FIG. 2A shows an illustrative schematic for a sandwich-type of immunoassay. The capture agent can be against a vesicle antigen of interest, e.g., a general vesicle biomarker, a cell-of-origin marker, or a disease marker. In the figure, the captured vesicles are detected using fluorescently labeled binding agent (detection agent) against vesicle antigens of interest. Multiple capture binding agents can be used, e.g., in distinguishable addresses on an array or different wells of an immunoassay plate. The detection binding agents can be against the same antigen as the capture binding agent, or can be directed against other markers. The capture binding agent can be any useful binding agent, e.g., tethered aptamers, antibodies or lectins, and/or the detector antibodies can be similarly substituted, e.g., with detectable (e.g., labeled) aptamers, antibodies, lectins or other binding proteins or entities. In an embodiment, one or more capture agents to a general vesicle biomarker, a cell-of-origin marker, and/or a disease marker are used along with detection agents against general vesicle biomarker, such as tetraspanin molecules including without limitation one or more of CD9, CD63 and CD81, or other markers in Table 3 herein. Examples of microvesicle surface antigens are disclosed herein, e.g. in Tables 3-4 and 18-25, or are known in the art, and examples useful in methods and compositions of the invention are disclosed of International Patent Application Nos. PCT/US2009/62880, filed Oct. 30, 2009; PCT/US2009/006095, filed Nov. 12, 2009; PCT/US2011/26750, filed Mar. 1, 2011; PCT/US2011/031479, filed Apr. 6, 2011; PCT/US11/48327, filed Aug. 18, 2011; PCT/US2008/71235, filed Jul. 25, 2008; PCT/US10/58461, filed Nov. 30, 2010; PCT/US2011/21160, filed Jan. 13, 2011; PCT/US2013/030302, filed Mar. 11, 2013; PCT/US12/25741, filed Feb. 17, 2012; PCT/2008/76109, filed Sep. 12, 2008; PCT/US12/42519, filed Jun. 14, 2012; PCT/US12/50030, filed Aug. 8, 2012; PCT/US12/49615, filed Aug. 3, 2012; PCT/US12/41387, filed Jun. 7, 2012; PCT/US2013/072019, filed Nov. 26, 2013; PCT/US2014/039858, filed May 28, 2013; PCT/IB2013/003092, filed Oct. 23, 2013; PCT/US13/76611, filed Dec. 19, 2013; PCT/US14/53306, filed Aug. 28, 2014; and PCT/US15/62184, filed Nov. 23, 2015; each of which applications is incorporated herein by reference in its entirety.

[0101] FIG. 2D presents an illustrative schematic for analyzing vesicles according to the methods of the invention. Capture agents are used to capture vesicles, detectors are used to detect the captured vesicles, and the level or presence of the captured and detected microvesicles is used to characterize a phenotype. Capture agents, detectors and characterizing phenotypes can be any of those described herein. For example, capture agents include antibodies or aptamers tethered to a substrate that recognize a vesicle antigen of interest, detectors include labeled antibodies or aptamers to a vesicle antigen of interest, and characterizing a phenotype includes a diagnosis, prognosis, or theranosis of a disease. In the scheme shown in FIG. 2D i), a population of vesicles is captured with one or more capture agents against general vesicle biomarkers (200). The captured vesicles are then labeled with detectors against cell-of-origin biomarkers (201) and/or disease specific biomarkers (202). If only cell-of-origin detectors are used (201), the biosignature used to characterize the phenotype (203) can include the general vesicle markers (200) and the cell-of-origin biomarkers (201). If only disease detectors are used (202), the biosignature used to characterize the phenotype (203) can include the general vesicle markers (200) and the disease biomarkers (202). Alternately, detectors are used to detect both cell-of-origin biomarkers (201) and disease specific biomarkers (202). In this case, the biosignature used to characterize the phenotype (203) can include the general vesicle markers (200), the cell-of-origin biomarkers (201) and the disease biomarkers (202). The biomarkers combinations are selected to characterize the phenotype of interest and can be selected from the biomarkers and phenotypes described herein, e.g., in Tables 1, 3-4 and 18-25.

[0102] In the scheme shown in FIG. 2D ii), a population of vesicles is captured with one or more capture agents against cell-of-origin biomarkers (210) and/or disease biomarkers (211). The captured vesicles are then detected using detectors against general vesicle biomarkers (212). If only cell-of-origin capture agents are used (210), the biosignature used to characterize the phenotype (213) can include the cell-of-origin biomarkers (210) and the general vesicle markers (212). If only disease biomarker capture agents are used (211), the biosignature used to characterize the phenotype (213) can include the disease biomarkers (211) and the general vesicle biomarkers (212). Alternately, capture agents to one or more cell-of-origin biomarkers (210) and one or more disease specific biomarkers (211) are used to capture vesicles. In this case, the biosignature used to characterize the phenotype (213) can include the cell-of-origin biomarkers (210), the disease biomarkers (211), and the general vesicle markers (213). The biomarkers combinations are selected to characterize the phenotype of interest and can be selected from the biomarkers and phenotypes described herein.

[0103] The methods of the invention comprise capture and detection of microvesicles of interest using any combination of useful biomarkers. For example, a microvesicle population can be captured using one or more binding agent to any desired combination of cell of origin, disease specific, or general vesicle markers. The captured microvesicles can then be detected using one or more binding agent to any desired combination of cell of origin, disease specific, or general vesicle markers. FIG. 2E represents a flow diagram of such configurations. Any one or more of a cell-of-origin biomarker (240), disease biomarkers (241), and general vesicle biomarker (242) is used to capture a microvesicle population. Thereafter, any one or more of a cell-of-origin biomarker (243), disease biomarkers (244), and general vesicle biomarker (245) is used to detect the captured microvesicle population. The biosignature of captured and detected microvesicles is then used to characterize a phenotype. The biomarkers combinations are selected to characterize the phenotype of interest and can be selected from the biomarkers and phenotypes described herein.

[0104] A microvesicle payload molecule can be assessed as a member of a biosignature panel. A payload molecule comprises any of the biological entities contained within a cell, cell fragment or vesicle membrane. These entities include without limitation nucleic acids, e.g., mRNA, microRNA, or DNA fragments; protein, e.g., soluble and membrane associated proteins; carbohydrates; lipids; metabolites; and various small molecules, e.g., hormones. The payload can be part of the cellular milieu that is encapsulated as a vesicle is formed in the cellular environment. In some embodiments of the invention, the payload is analyzed in addition to detecting vesicle surface antigens. Specific populations of vesicles can be captured as described above then the payload in the captured vesicles can be used to characterize a phenotype. For example, vesicles captured on a substrate can be further isolated to assess the payload therein. Alternately, the vesicles in a sample are detected and sorted without capture. The vesicles so detected can be further isolated to assess the payload therein. In an embodiment, vesicle populations are sorted by flow cytometry and the payload in the sorted vesicles is analyzed. In the scheme shown in FIG. 2F iv), a population of vesicles is captured and/or detected (220) using one or more of cell-of-origin biomarkers (220), disease biomarkers (221), and/or general vesicle markers (222). The payload of the isolated vesicles is assessed (223). A biosignature detected within the payload can be used to characterize a phenotype (224). In a non-limiting example, a vesicle population can be analyzed in a plasma sample from a patient using antibodies against one or more vesicle antigens of interest. The antibodies can be capture antibodies which are tethered to a substrate to isolate a desired vesicle population. Alternately, the antibodies can be directly labeled and the labeled vesicles isolated by sorting with flow cytometry. The presence or level of microRNA or mRNA extracted from the isolated vesicle population can be used to detect a biosignature. The biosignature is then used to diagnose, prognose or theranose the patient.

[0105] In other embodiments, vesicle or cellular payload is analyzed in a population (e.g., cells or vesicles) without first capturing or detected subpopulations of vesicles. For example, a cellular or extracellular vesicle population can be generally isolated from a sample using centrifugation, filtration, chromatography, or other techniques as described herein and known in the art. The payload of such sample components can be analyzed thereafter to detect a biosignature and characterize a phenotype. In the scheme shown in FIG. 2F v), a population of vesicles is isolated (230) and the payload of the isolated vesicles is assessed (231). A biosignature detected within the payload can be used to characterize a phenotype (232). In a non-limiting example, a vesicle population is isolated from a plasma sample from a patient using size exclusion and membrane filtration. The presence or level of microRNA or mRNA extracted from the vesicle population is used to detect a biosignature. The biosignature is then used to diagnose, prognose or theranose the patient.

[0106] The biomarkers used to detect a vesicle population can be selected to detect a microvesicle population of interest, e.g., a population of vesicles that provides a diagnosis, prognosis or theranosis of a selected condition or disease, including but not limited to a cancer, a premalignant condition, an inflammatory disease, an immune disease, an autoimmune disease or disorder, a cardiovascular disease or disorder, neurological disease or disorder, infectious disease or pain. See Section “Phenotypes” herein for more detail. In an embodiment, the biomarkers are selected from the group consisting of EpCam (epithelial cell adhesion molecule), CD9 (tetraspanin CD9 molecule), PCSA (prostate cell specific antigen, see Rokhlin et al., 5E10: a prostate-specific surface-reactive monoclonal antibody. Cancer Lett. 1998 131:129-36), CD63 (tetraspanin CD63 molecule), CD81 (tetraspanin CD81 molecule), PSMA (FOLH1, folate hydrolase (prostate-specific membrane antigen) 1), B7H3 (CD276 molecule), PSCA (prostate stem cell antigen), ICAM (intercellular adhesion molecule), STEAP (STEAP1, six transmembrane epithelial antigen of the prostate 1), KLK2 (kallikrein-related peptidase 2), SSX2 (synovial sarcoma, X breakpoint 2), SSX4 (synovial sarcoma, X breakpoint 4), PBP (prostatic binding protein), SPDEF (SAM pointed domain containing ets transcription factor), EGFR (epidermal growth factor receptor), and a combination thereof. One or more of these markers can provide a biosignature for a specific condition, such as to detect a cancer, including without limitation a carcinoma, a prostate cancer, a breast cancer, a lung cancer, a colorectal cancer, an ovarian cancer, melanoma, a brain cancer, or other type of cancer as disclosed herein. In an embodiment, a binding agent to one or more of these markers is used to capture a microvesicle population, and an aptamer of the invention is used to assist in detection of the capture vesicles as described herein. In other embodiments, an aptamer of the invention is used to capture a microvesicle population, and a binding agent to one or more of these markers is used to assist in detection of the capture vesicles as described herein. The binding agents can be any useful binding agent as disclosed herein or known in the art, e.g., antibodies or aptamers.

[0107] The methods of characterizing a phenotype can employ a combination of techniques to assess a component or population of components present in a biological sample of interest. For example, an aptamer of the invention can be used to assess a single cell, or a single extracellular vesicle or a population of cells or population of vesicles. A sample may be split into various aliquots, where each is analyzed separately. For example, protein content of one or more aliquot is determined and microRNA content of one or more other aliquot is determined. The protein content and microRNA content can be combined to characterize a phenotype. In another embodiment, a component present in a biological sample of interest is isolated and the payload therein is assessed (e.g., capture a population of subpopulation of vesicles using an aptamer of the invention and further assess nucleic acid or proteins present in the isolated vesicles).

[0108] In one embodiment, a population of vesicles with a given surface marker can be isolated by using a binding agent to a microvesicle surface marker. See, e.g., FIGS. 2A, 2B, 21A. The binding agent can be an aptamer that was identified to target the microvesicle surface marker using to the methods of the invention. The isolated vesicles is assessed for additional biomarkers such as surface content or payload, which can be contemporaneous to detection of the aptamer-specific target or the assessment of additional biomarkers can be before or subsequent to aptamer-specific target detection.

[0109] A biosignature can be detected qualitatively or quantitatively by detecting a presence, level or concentration of a circulating biomarker, e.g., a microRNA, protein, vesicle or other biomarker, as disclosed herein. These biosignature components can be detected using a number of techniques known to those of skill in the art. For example, a biomarker can be detected by microarray analysis, polymerase chain reaction (PCR) (including PCR-based methods such as real time polymerase chain reaction (RT-PCR), quantitative real time polymerase chain reaction (Q-PCR/qPCR) and the like), hybridization with allele-specific probes, enzymatic mutation detection, ligation chain reaction (LCR), oligonucleotide ligation assay (OLA), flow-cytometric heteroduplex analysis, chemical cleavage of mismatches, mass spectrometry, nucleic acid sequencing, single strand conformation polymorphism (SSCP), denaturing gradient gel electrophoresis (DGGE), temperature gradient gel electrophoresis (TGGE), restriction fragment polymorphisms, serial analysis of gene expression (SAGE), or combinations thereof. A biomarker, such as a nucleic acid, can be amplified prior to detection. A biomarker can also be detected by immunoassay, immunoblot, immunoprecipitation, enzyme-linked immunosorbent assay (ELISA; EIA), radioimmunoassay (RIA), flow cytometry, or electron microscopy (EM).

[0110] Biosignatures can be detected using aptamers of the invention that function as either as capture agents and detection agents, as described herein. A capture agent can comprise an antibody, aptamer or other entity which recognizes a biomarker and can be used for capturing the biomarker. Biomarkers that can be captured include circulating biomarkers, e.g., a protein, nucleic acid, lipid or biological complex in solution in a bodily fluid. Similarly, the capture agent can be used for capturing a vesicle. A detection agent can comprise an antibody or other entity which recognizes a biomarker and can be used for detecting the biomarker vesicle, or which recognizes a vesicle and is useful for detecting a vesicle. In some embodiments, the detection agent is labeled and the label is detected, thereby detecting the biomarker or vesicle. The detection agent can be a binding agent, e.g., an antibody or aptamer. In other embodiments, the detection agent comprises a small molecule such as a membrane protein labeling agent. See, e.g., the membrane protein labeling agents disclosed in Alroy et al., US. Patent Publication US 2005/0158708. In an embodiment, vesicles are isolated or captured as described herein, and one or more membrane protein labeling agent is used to detect the vesicles. In many cases, the antigen or other vesicle-moiety that is recognized by the capture and detection agents are interchangeable.

[0111] In a non-limiting embodiment, a vesicle having a cell-of-origin specific antigen on its surface and a cancer-specific antigen on its surface, is captured using a binding agent that is specific to a cells-specific antigen, e.g., by tethering the capture antibody or aptamer to a substrate, and then the vesicle is detected using a binding agent to a disease-specific antigen, e.g., by labeling the binding agent used for detection with a fluorescent dye and detecting the fluorescent radiation emitted by the dye.

[0112] It will be apparent to one of skill in the art that where the target molecule for a binding agent (such as an aptamer of the invention) is informative as to assessing a condition or disease, the same binding agent can be used to both capture a component comprising the target molecule (e.g., microvesicle surface antigen of interest) and also be modified to comprise a detectable label so as to detect the target molecule, e.g., binding agent₁-antigen-binding agent₂*, wherein the * signifies a detectable label; binding agent₁ and binding agent₂ may be the same binding agent or a different binding agent (e.g., same aptamer or different aptamer). In addition, binding agent₁ and binding agent₂ can be selected from wholly different categories of binding agents (e.g., antibody, aptamer, synthetic antibody, peptide-nucleic acid molecule, or any molecule that is configured to specifically bind to or associate with its target molecule). Such binding molecules can be selected solely based on their binding specificity for a target molecule. Examples of additional biomarkers that can be incorporated into the methods and compositions of the invention are known in the art, such as those disclosed in International Patent Publication Nos. WO/2012/174282 (Int'l Appl. PCT/US2012/042519 filed Jun. 14, 2012) and WO/2013/020995 (Int'l Appl. PCT/US2012/050030 filed Aug. 8, 2013). The detectable signal can itself be associated with a nucleic acid molecule that hybridizes with a stretch of nucleic acids present in each oligonucleotide comprising a probing library. The stretch can be the same or different as to one or more oligonucleotides in a library. The detectable signal can comprise fluorescence agents, including color-coded barcodes which are known, such as in U.S. Patent Application Pub. No. 20140371088, 2013017837, and 20120258870.

[0113] Techniques of detecting biomarkers or capturing sample components using an aptamer of the invention include the use of a planar substrate such as an array (e.g., biochip or microarray), with molecules immobilized to the substrate as capture agents that facilitate the detection of a particular biosignature. The array can be provided as part of a kit for assaying one or more biomarkers. Additional examples of binding agents described above and useful in the compositions and methods of the invention are disclosed in International Patent Publication No. WO/2011/127219, entitled “Circulating Biomarkers for Disease” and filed Apr. 6, 2011, which application is incorporated by reference in its entirety herein. Aptamers of the invention can be included in an array for detection and diagnosis of diseases including presymptomatic diseases. In some embodiments, an array comprises a custom array comprising biomolecules selected to specifically identify biomarkers of interest. Customized arrays can be modified to detect biomarkers that increase statistical performance, e.g., additional biomolecules that identifies a biosignature which lead to improved cross-validated error rates in multivariate prediction models (e.g., logistic regression, discriminant analysis, or regression tree models). In some embodiments, customized array(s) are constructed to study the biology of a disease, condition or syndrome and profile biosignatures in defined physiological states. Markers for inclusion on the customized array be chosen based upon statistical criteria, e.g., having a desired level of statistical significance in differentiating between phenotypes or physiological states. In some embodiments, standard significance of p-value=0.05 is chosen to exclude or include biomolecules on the microarray. The p-values can be corrected for multiple comparisons. As an illustrative example, nucleic acids extracted from samples from a subject with or without a disease can be hybridized to a high density microarray that binds to thousands of gene sequences. Nucleic acids whose levels are significantly different between the samples with or without the disease can be selected as biomarkers to distinguish samples as having the disease or not. A customized array can be constructed to detect the selected biomarkers. In some embodiments, customized arrays comprise low density microarrays, which refer to arrays with lower number of addressable binding agents, e.g., tens or hundreds instead of thousands. Low density arrays can be formed on a substrate. In some embodiments, customizable low density arrays use PCR amplification in plate wells, e.g., TaqMan® Gene Expression Assays (Applied Biosystems by Life Technologies Corporation, Carlsbad, Calif.).

[0114] An aptamer of the invention or other useful binding agent may be linked directly or indirectly to a solid surface or substrate. See, e.g., FIGS. 2A-2B, 9, 21A. A solid surface or substrate can be any physically separable solid to which a binding agent can be directly or indirectly attached including, but not limited to, surfaces provided by microarrays and wells, particles such as beads, columns, optical fibers, wipes, glass and modified or functionalized glass, quartz, mica, diazotized membranes (paper or nylon), polyformaldehyde, cellulose, cellulose acetate, paper, ceramics, metals, metalloids, semiconductive materials, quantum dots, coated beads or particles, other chromatographic materials, magnetic particles; plastics (including acrylics, polystyrene, copolymers of styrene or other materials, polypropylene, polyethylene, polybutylene, polyurethanes, Teflon material, etc.), polysaccharides, nylon or nitrocellulose, resins, silica or silica-based materials including silicon and modified silicon, carbon, metals, inorganic glasses, plastics, ceramics, conducting polymers (including polymers such as polypyrole and polyindole); micro or nanostructured surfaces such as nucleic acid tiling arrays, nanotube, nanowire, or nanoparticulate decorated surfaces; or porous surfaces or gels such as methacrylates, acrylamides, sugar polymers, cellulose, silicates, or other fibrous or stranded polymers. In addition, as is known the art, the substrate may be coated using passive or chemically-derivatized coatings with any number of materials, including polymers, such as dextrans, acrylamides, gelatins or agarose. Such coatings can facilitate the use of the array with a biological sample.

[0115] As provided in the examples, below, an aptamer or other useful binding agent can be conjugated to a detectable entity or label.

[0116] Appropriate labels include without limitation a magnetic label, a fluorescent moiety, an enzyme, a chemiluminescent probe, a metal particle, a non-metal colloidal particle, a polymeric dye particle, a pigment molecule, a pigment particle, an electrochemically active species, semiconductor nanocrystal or other nanoparticles including quantum dots or gold particles, fluorophores, quantum dots, or radioactive labels. Protein labels include green fluorescent protein (GFP) and variants thereof (e.g., cyan fluorescent protein and yellow fluorescent protein); and luminescent proteins such as luciferase, as described below. Radioactive labels include without limitation radioisotopes (radionuclides), such as ³H, ¹¹C, ¹⁴C, ¹⁸F, ³²P, ³⁵S, ⁶⁴Cu, ⁶⁸Ga, ⁸⁶Y, ⁹⁹Tc, ¹¹¹In, ¹²³I, ¹²⁴I, ¹²⁵I, ¹³¹I, ¹³³Xe, ⁷⁷Lu, ²¹¹At, or ²¹³Bi. Fluorescent labels include without limitation a rare earth chelate (e.g., europium chelate), rhodamine; fluorescein types including without limitation FITC, 5-carboxyfluorescein, 6-carboxy fluorescein; a rhodamine type including without limitation TAMRA; dansyl; Lissamine; cyanines; phycoerythrins; Texas Red; Cy3, Cy5, dapoxyl, NBD, Cascade Yellow, dansyl, PyMPO, pyrene, 7-diethylaminocoumarin-3-carboxylic acid and other coumarin derivatives, Marina Blue™, Pacific Blue™, Cascade Blue™, 2-anthracenesulfonyl, PyMPO, 3,4,9,10-perylene-tetracarboxylic acid, 2,7-difluorofluorescein (Oregon Green™ 488-X), 5-carboxyfluorescein, Texas Red™-X, Alexa Fluor 430, 5-carboxytetramethylrhodamine (5-TAMRA), 6-carboxytetramethyrhodamine (6-TAMRA), BODIPY FL, bimane, and Alexa Fluor 350, 405, 488, 500, 514, 532, 546, 555, 568, 594, 610, 633, 647, 660, 680, 700, and 750, and derivatives thereof, among many others. See, e.g., “The Handbook—A Guide to Fluorescent Probes and Labeling Technologies,” Tenth Edition, available on the internet at probes (dot) invitrogen (dot) com/handbook. The fluorescent label can be one or more of FAM, dRHO, 5-FAM, 6FAM, dR6G, JOE, HEX, VIC, TET, dTAMRA, TAMRA, NED, dROX, PET, BHQ, Gold540 and LIZ.

[0117] Using conventional techniques, an aptamer can be directly or indirectly labeled, e.g., the label is attached to the aptamer through biotin-streptavidin (e.g., synthesize a biotinylated aptamer, which is then capable of binding a streptavidin molecule that is itself conjugated to a detectable label; non-limiting example is streptavidin, phycoerythrin conjugated (SAPE)). Methods for chemical coupling using multiple step procedures include biotinylation, coupling of trinitrophenol (TNP) or digoxigenin using for example succinimide esters of these compounds. Biotinylation can be accomplished by, for example, the use of D-biotinyl-N-hydroxysuccinimide. Succinimide groups react effectively with amino groups at pH values above 7, and preferentially between about pH 8.0 and about pH 8.5. Alternatively, an aptamer is not labeled, but is later contacted with a second antibody that is labeled after the first antibody is bound to an antigen of interest.

[0118] Various enzyme-substrate labels may also be used in conjunction with a composition or method of the invention. Such enzyme-substrate labels are available commercially (e.g., U.S. Pat. No. 4,275,149). The enzyme generally catalyzes a chemical alteration of a chromogenic substrate that can be measured using various techniques. For example, the enzyme may catalyze a color change in a substrate, which can be measured spectrophotometrically. Alternatively, the enzyme may alter the fluorescence or chemiluminescence of the substrate. Examples of enzymatic labels include luciferases (e.g., firefly luciferase and bacterial luciferase; U.S. Pat. No. 4,737,456), luciferin, 2,3-dihydrophthalazinediones, malate dehydrogenase, urease, peroxidase such as horseradish peroxidase (HRP), alkaline phosphatase (AP), β-galactosidase, glucoamylase, lysozyme, saccharide oxidases (e.g., glucose oxidase, galactose oxidase, and glucose-6-phosphate dehydrogenase), heterocyclic oxidases (such as uricase and xanthine oxidase), lactoperoxidase, microperoxidase, and the like. Examples of enzyme-substrate combinations include, but are not limited to, horseradish peroxidase (HRP) with hydrogen peroxidase as a substrate, wherein the hydrogen peroxidase oxidizes a dye precursor (e.g., orthophenylene diamine (OPD) or 3,3′,5,5′-tetramethylbenzidine hydrochloride (TMB)); alkaline phosphatase (AP) with para-nitrophenyl phosphate as chromogenic substrate; and β-D-galactosidase β-D-Gal) with a chromogenic substrate (e.g., p-nitrophenyl-β-D-galactosidase) or fluorogenic substrate 4-methylumbelliferyl-p-D-galactosidase.

[0119] Aptamer(s) can be linked to a substrate such as a planar substrate. A planar array generally contains addressable locations (e.g., pads, addresses, or micro-locations) of biomolecules in an array format. The size of the array will depend on the composition and end use of the array. Arrays can be made containing from 2 different molecules to many thousands. Generally, the array comprises from two to as many as 100,000 or more molecules, depending on the end use of the array and the method of manufacture. A microarray for use with the invention comprises at least one biomolecule that identifies or captures a biomarker present in a biosignature of interest, e.g., a microRNA or other biomolecule or vesicle that makes up the biosignature. In some arrays, multiple substrates are used, either of different or identical compositions. Accordingly, planar arrays may comprise a plurality of smaller substrates.

[0120] The present invention can make use of many types of arrays for detecting a biomarker, e.g., a biomarker associated with a biosignature of interest. Useful arrays or microarrays include without limitation DNA microarrays, such as cDNA microarrays, oligonucleotide microarrays and SNP microarrays, microRNA arrays, protein microarrays, antibody microarrays, tissue microarrays, cellular microarrays (also called transfection microarrays), chemical compound microarrays, and carbohydrate arrays (glycoarrays). These arrays are described in more detail above. In some embodiments, microarrays comprise biochips that provide high-density immobilized arrays of recognition molecules (e.g., aptamers or antibodies), where biomarker binding is monitored indirectly (e.g., via fluorescence).

[0121] An array or microarray that can be used to detect one or more biomarkers of a biosignature and comprising one or more aptamers of the invention can be made according to the methods described in U.S. Pat. Nos. 6,329,209; 6,365,418; 6,406,921; 6,475,808; and 6,475,809, and U.S. patent application Ser. No. 10/884,269, each of which is herein incorporated by reference in its entirety. Custom arrays to detect specific selections of sets of biomarkers described herein can be made using the methods described in these patents. Commercially available microarrays can also be used to carry out the methods of the invention, including without limitation those from Affymetrix (Santa Clara, Calif.), Illumina (San Diego, Calif.), Agilent (Santa Clara, Calif.), Exiqon (Denmark), or Invitrogen (Carlsbad, Calif.). Custom and/or commercial arrays include arrays for detection proteins, nucleic acids, and other biological molecules and entities (e.g., cells, vesicles, virii) as described herein.

[0122] In some embodiments, multiple capture molecules are disposed on an array, e.g., proteins, peptides or additional nucleic acid molecules. In certain embodiments, the proteins are immobilized using methods and materials that minimize the denaturing of the proteins, that minimize alterations in the activity of the proteins, or that minimize interactions between the protein and the surface on which they are immobilized. The capture molecules can comprise one or more aptamer of the invention. In one embodiment, an array is constructed for the hybridization of a pool of aptamers. The array can then be used to identify pool members that bind a sample, thereby facilitating characterization of a phenotype. See FIGS. 19B-19C and related disclosure for further details.

[0123] Array surfaces useful may be of any desired shape, form, or size. Non-limiting examples of surfaces include chips, continuous surfaces, curved surfaces, flexible surfaces, films, plates, sheets, or tubes. Surfaces can have areas ranging from approximately a square micron to approximately 500 cm². The area, length, and width of surfaces may be varied according to the requirements of the assay to be performed. Considerations may include, for example, ease of handling, limitations of the material(s) of which the surface is formed, requirements of detection systems, requirements of deposition systems (e.g., arrayers), or the like.

[0124] In certain embodiments, it is desirable to employ a physical means for separating groups or arrays of binding islands or immobilized biomolecules: such physical separation facilitates exposure of different groups or arrays to different solutions of interest. Therefore, in certain embodiments, arrays are situated within microwell plates having any number of wells. In such embodiments, the bottoms of the wells may serve as surfaces for the formation of arrays, or arrays may be formed on other surfaces and then placed into wells. In certain embodiments, such as where a surface without wells is used, binding islands may be formed or molecules may be immobilized on a surface and a gasket having holes spatially arranged so that they correspond to the islands or biomolecules may be placed on the surface. Such a gasket is preferably liquid tight. A gasket may be placed on a surface at any time during the process of making the array and may be removed if separation of groups or arrays is no longer desired.

[0125] In some embodiments, the immobilized molecules can bind to one or more biomarkers or vesicles present in a biological sample contacting the immobilized molecules. In some embodiments, the immobilized molecules modify or are modified by molecules present in the one or more vesicles contacting the immobilized molecules. Contacting the sample typically comprises overlaying the sample upon the array.

[0126] Modifications or binding of molecules in solution or immobilized on an array can be detected using detection techniques known in the art. Examples of such techniques include immunological techniques such as competitive binding assays and sandwich assays; fluorescence detection using instruments such as confocal scanners, confocal microscopes, or CCD-based systems and techniques such as fluorescence, fluorescence polarization (FP), fluorescence resonant energy transfer (FRET), total internal reflection fluorescence (TIRF), fluorescence correlation spectroscopy (FCS); colorimetric/spectrometric techniques; surface plasmon resonance, by which changes in mass of materials adsorbed at surfaces are measured; techniques using radioisotopes, including conventional radioisotope binding and scintillation proximity assays (SPA); mass spectroscopy, such as matrix-assisted laser desorption/ionization mass spectroscopy (MALDI) and MALDI-time of flight (TOF) mass spectroscopy; ellipsometry, which is an optical method of measuring thickness of protein films; quartz crystal microbalance (QCM), a very sensitive method for measuring mass of materials adsorbing to surfaces; scanning probe microscopies, such as atomic force microscopy (AFM), scanning force microscopy (SFM) or scanning electron microscopy (SEM); and techniques such as electrochemical, impedance, acoustic, microwave, and IR/Raman detection. See, e.g., Mere L, et al., “Miniaturized FRET assays and microfluidics: key components for ultra-high-throughput screening,” Drug Discovery Today 4(8):363-369 (1999), and references cited therein; Lakowicz J R, Principles of Fluorescence Spectroscopy, 2nd Edition, Plenum Press (1999), or Jain K K: Integrative Omics, Pharmacoproteomics, and Human Body Fluids. In: Thongboonkerd V, ed., ed. Proteomics of Human Body Fluids: Principles, Methods and Applications. Volume 1: Totowa, N.J.: Humana Press, 2007, each of which is herein incorporated by reference in its entirety.

[0127] Microarray technology can be combined with mass spectroscopy (MS) analysis and other tools. Electrospray interface to a mass spectrometer can be integrated with a capillary in a microfluidics device. For example, one commercially available system contains eTag reporters that are fluorescent labels with unique and well-defined electrophoretic mobilities; each label is coupled to biological or chemical probes via cleavable linkages. The distinct mobility address of each eTag reporter allows mixtures of these tags to be rapidly deconvoluted and quantitated by capillary electrophoresis. This system allows concurrent gene expression, protein expression, and protein function analyses from the same sample Jain K K: Integrative Omics, Pharmacoproteomics, and Human Body Fluids. In: Thongboonkerd V, ed., ed. Proteomics of Human Body Fluids: Principles, Methods and Applications. Volume 1: Totowa, N.J.: Humana Press, 2007, which is herein incorporated by reference in its entirety.

[0128] A biochip can include components for a microfluidic or nanofluidic assay. A microfluidic device can be used for isolating or analyzing biomarkers, such as determining a biosignature. Microfluidic systems allow for the miniaturization and compartmentalization of one or more processes for isolating, capturing or detecting a vesicle, detecting a microRNA, detecting a circulating biomarker, detecting a biosignature, and other processes. The microfluidic devices can use one or more detection reagents in at least one aspect of the system, and such a detection reagent can be used to detect one or more biomarkers. In one embodiment, the device detects a biomarker on an isolated or bound vesicle. Various probes, antibodies, proteins, or other binding agents can be used to detect a biomarker within the microfluidic system. The detection agents may be immobilized in different compartments of the microfluidic device or be entered into a hybridization or detection reaction through various channels of the device.

[0129] A vesicle in a microfluidic device can be lysed and its contents detected within the microfluidic device, such as proteins or nucleic acids, e.g., DNA or RNA such as miRNA or mRNA. The nucleic acid may be amplified prior to detection, or directly detected, within the microfluidic device. Thus microfluidic system can also be used for multiplexing detection of various biomarkers. In an embodiment, vesicles are captured within the microfluidic device, the captured vesicles are lysed, and a biosignature of microRNA from the vesicle payload is determined. The biosignature can further comprise the capture agent used to capture the vesicle.

[0130] Novel nanofabrication techniques are opening up the possibilities for biosensing applications that rely on fabrication of high-density, precision arrays, e.g., nucleotide-based chips and protein arrays otherwise known as heterogeneous nanoarrays. Nanofluidics allows a further reduction in the quantity of fluid analyte in a microchip to nanoliter levels, and the chips used here are referred to as nanochips. See, e.g., Unger M et al., Biotechniques 1999; 27(5):1008-14, Kartalov E P et al., Biotechniques 2006; 40(1):85-90, each of which are herein incorporated by reference in their entireties. Commercially available nanochips currently provide simple one step assays such as total cholesterol, total protein or glucose assays that can be run by combining sample and reagents, mixing and monitoring of the reaction. Gel-free analytical approaches based on liquid chromatography (LC) and nanoLC separations (Cutillas et al. Proteomics, 2005; 5:101-112 and Cutillas et al., Mol Cell Proteomics 2005; 4:1038-1051, each of which is herein incorporated by reference in its entirety) can be used in combination with the nanochips.

[0131] An array suitable for identifying a disease, condition, syndrome or physiological status can be included in a kit. A kit can include, an aptamer of the invention, including as non-limiting examples, one or more reagents useful for preparing molecules for immobilization onto binding islands or areas of an array, reagents useful for detecting binding of a vesicle to immobilized molecules, and instructions for use.

[0132] Further provided herein is a rapid detection device that facilitates the detection of a particular biosignature in a biological sample. The device can integrate biological sample preparation with polymerase chain reaction (PCR) on a chip. The device can facilitate the detection of a particular biosignature of a vesicle in a biological sample, and an example is provided as described in Pipper et al., Angewandte Chemie, 47(21), p. 3900-3904 (2008), which is herein incorporated by reference in its entirety. A biosignature can be incorporated using micro-/nano-electrochemical system (MEMS/NEMS) sensors and oral fluid for diagnostic applications as described in Li et al., Adv Dent Res 18(1): 3-5 (2005), which is herein incorporated by reference in its entirety.

[0133] Particle Arrays

[0134] As an alternative to planar arrays, assays using particles, such as bead based assays are also capable of use with an aptamer of the invention. Aptamers are easily conjugated with commercially available beads. See, e.g., Srinivas et al. Anal. Chem. 2011 Oct. 21, Aptamer functionalized Microgel Particles for Protein Detection; See also, review article on aptamers as therapeutic and diagnostic agents, Brody and Gold, Rev. Mol. Biotech. 2000, 74:5-13.

[0135] Multiparametric assays or other high throughput detection assays using bead coatings with cognate ligands and reporter molecules with specific activities consistent with high sensitivity automation can be used. In a bead based assay system, a binding agent for a biomarker or vesicle, such as a capture agent (e.g. capture antibody), can be immobilized on an addressable microsphere. Each binding agent for each individual binding assay can be coupled to a distinct type of microsphere (i.e., microbead) and the assay reaction takes place on the surface of the microsphere, such as depicted in FIG. 2B. A binding agent for a vesicle can be a capture antibody coupled to a bead. Dyed microspheres with discrete fluorescence intensities are loaded separately with their appropriate binding agent or capture probes. The different bead sets carrying different binding agents can be pooled as desired to generate custom bead arrays. Bead arrays are then incubated with the sample in a single reaction vessel to perform the assay.

[0136] Bead-based assays can also be used with one or more aptamers of the invention. A bead substrate can provide a platform for attaching one or more binding agents, including aptamer(s). For multiplexing, multiple different bead sets (e.g., Illumina, Luminex) can have different binding agents (specific to different target molecules). For example, a bead can be conjugated to an aptamer of the invention used to detect the presence (quantitatively or qualitatively) of an antigen of interest, or it can also be used to isolate a component present in a selected biological sample (e.g., cell, cell-fragment or vesicle comprising the target molecule to which the aptamer is configured to bind or associate). Any molecule of organic origin can be successfully conjugated to a polystyrene bead through use of commercially available kits.

[0137] One or more aptamers of the invention can be used with any bead based substrate, including but not limited to magnetic capture method, fluorescence activated cell sorting (FACS) or laser cytometry. Magnetic capture methods can include, but are not limited to, the use of magnetically activated cell sorter (MACS) microbeads or magnetic columns. Examples of bead or particle based methods that can be modified to use an aptamer of the invention include methods and bead systems described in U.S. Pat. Nos. 4,551,435, 4,795,698, 4,925,788, 5,108,933, 5,186,827, 5,200,084 or 5,158,871; 7,399,632; 8,124,015; 8,008,019; 7,955,802; 7,445,844; 7,274,316; 6,773,812; 6,623,526; 6,599,331; 6,057,107; 5,736,330; International Patent Publication No. WO/2012/174282; WO/1993/022684.

[0138] Flow Cytometry

[0139] Isolation or detection of circulating biomarkers, e.g., protein antigens, from a biological sample, or of the biomarker-comprising cells, cell fragments or vesicles may also be achieved using an aptamer of the invention in a cytometry process. As a non-limiting example, aptamers of the invention can be used in an assay comprising using a particle such as a bead or microsphere The invention provides aptamers as binding agents, which may be conjugated to the particle. Flow cytometry can be used for sorting microscopic particles suspended in a stream of fluid. As particles pass through they can be selectively charged and on their exit can be deflected into separate paths of flow. It is therefore possible to separate populations from an original mix, such as a biological sample, with a high degree of accuracy and speed. Flow cytometry allows simultaneous multiparametric analysis of the physical and/or chemical characteristics of single cells flowing through an optical/electronic detection apparatus. A beam of light, usually laser light, of a single frequency (color) is directed onto a hydrodynamically focused stream of fluid. A number of detectors are aimed at the point where the stream passes through the light beam; one in line with the light beam (Forward Scatter or FSC) and several perpendicular to it (Side Scatter or SSC) and one or more fluorescent detectors.

[0140] Each suspended particle passing through the beam scatters the light in some way, and fluorescent chemicals in the particle may be excited into emitting light at a lower frequency than the light source. This combination of scattered and fluorescent light is picked up by the detectors, and by analyzing fluctuations in brightness at each detector (one for each fluorescent emission peak), it is possible to deduce various facts about the physical and chemical structure of each individual particle. FSC correlates with the cell size and SSC depends on the inner complexity of the particle, such as shape of the nucleus, the amount and type of cytoplasmic granules or the membrane roughness. Some flow cytometers have eliminated the need for fluorescence and use only light scatter for measurement.

[0141] Flow cytometers can analyze several thousand particles every second in “real time” and can actively separate out and isolate particles having specified properties. They offer high-throughput automated quantification, and separation, of the set parameters for a high number of single cells during each analysis session. Flow cytometers can have multiple lasers and fluorescence detectors, allowing multiple labels to be used to more precisely specify a target population by their phenotype. Thus, a flow cytometer, such as a multicolor flow cytometer, can be used to detect one or more vesicles with multiple fluorescent labels or colors. In some embodiments, the flow cytometer can also sort or isolate different vesicle populations, such as by size or by different markers.

[0142] The flow cytometer may have one or more lasers, such as 1, 2, 3, 4, 5, 6, 7, 8, 9, 10 or more lasers. In some embodiments, the flow cytometer can detect more than one color or fluorescent label, such as at least 2, 3, 4, 5, 6, 7, 8, 9, 10, 11, 12, 13, 14, 15, 16, 17, 18, 19, or 20 different colors or fluorescent labels. For example, the flow cytometer can have at least 2, 3, 4, 5, 6, 7, 8, 9, 10, 11, 12, 13, 14, 15, 16, 17, 18, 19, or 20 fluorescence detectors.

[0143] Examples of commercially available flow cytometers that can be used to detect or analyze one or more vesicles, to sort or separate different populations of vesicles, include, but are not limited to the MoFlo™ XDP Cell Sorter (Beckman Coulter, Brea, Calif.), MoFo™ Legacy Cell Sorter (Beckman Coulter, Brea, Calif.), BD FACSAria™ Cell Sorter (BD Biosciences, San Jose, Calif.), BD™ LSRII (BD Biosciences, San Jose, Calif.), and BD FACSCalibur™ (BD Biosciences, San Jose, Calif.). Use of multicolor or multi-fluor cytometers can be used in multiplex analysis of vesicles, as further described below. In some embodiments, the flow cytometer can sort, and thereby collect or sort more than one population of vesicles based one or more characteristics. For example, two populations of vesicles differ in size, such that the vesicles within each population have a similar size range and can be differentially detected or sorted. In another embodiment, two different populations of vesicles are differentially labeled.

[0144] The data resulting from flow-cytometers can be plotted in 1 dimension to produce histograms or seen in 2 dimensions as dot plots or in 3 dimensions with newer software. The regions on these plots can be sequentially separated by a series of subset extractions which are termed gates. Specific gating protocols exist for diagnostic and clinical purposes especially in relation to hematology. The plots are often made on logarithmic scales. Because different fluorescent dye's emission spectra overlap, signals at the detectors have to be compensated electronically as well as computationally. Fluorophores for labeling biomarkers may include those described in Ormerod, Flow Cytometry 2nd ed., Springer-Verlag, New York (1999), and in Nida et al., Gynecologic Oncology 2005; 4 889-894 which is incorporated herein by reference. In a multiplexed assay, including but not limited to a flow cytometry assay, one or more different target molecules can be assessed, wherein at least one of the target molecules is a microvesicle surface antigen assessed using an aptamer of the invention.

[0145] Microfluidics

[0146] One or more aptamer of the invention can be disposed on any useful planar or bead substrate. In one aspect of the invention one or more aptamer of the invention is disposed on a microfluidic device, thereby facilitating assessing, characterizing or isolating a component of a biological sample comprising a polypeptide antigen of interest or a functional fragment thereof. For example, the circulating antigen or a cell, cell fragment or cell-derived vesicles comprising the antigen can be assessed using one or more aptamers of the invention (alternatively along with additional binding agents). Microfluidic devices, which may also be referred to as “lab-on-a-chip” systems, biomedical micro-electro-mechanical systems (bioMEMs), or multicomponent integrated systems, can be used for isolating and analyzing a vesicle. Such systems miniaturize and compartmentalize processes that allow for binding of vesicles, detection of biosignatures, and other processes.

[0147] A microfluidic device can also be used for isolation of a vesicle through size differential or affinity selection. For example, a microfluidic device can use one more channels for isolating a vesicle from a biological sample based on size or by using one or more binding agents for isolating a vesicle from a biological sample. A biological sample can be introduced into one or more microfluidic channels, which selectively allows the passage of a vesicle. The selection can be based on a property of the vesicle, such as the size, shape, deformability, or biosignature of the vesicle.

[0148] In one embodiment, a heterogeneous population of vesicles can be introduced into a microfluidic device, and one or more different homogeneous populations of vesicles can be obtained. For example, different channels can have different size selections or binding agents to select for different vesicle populations. Thus, a microfluidic device can isolate a plurality of vesicles wherein at least a subset of the plurality of vesicles comprises a different biosignature from another subset of the plurality of vesicles. For example, the microfluidic device can isolate at least 2, 3, 4, 5, 6, 7, 8, 9, 10, 15, 20, 25, 30, 40, 50, 60, 70, 80, 90, or 100 different subsets of vesicles, wherein each subset of vesicles comprises a different biosignature.

[0149] In some embodiments, the microfluidic device can comprise one or more channels that permit further enrichment or selection of a vesicle. A population of vesicles that has been enriched after passage through a first channel can be introduced into a second channel, which allows the passage of the desired vesicle or vesicle population to be further enriched, such as through one or more binding agents present in the second channel.

[0150] Array-based assays and bead-based assays can be used with microfluidic device. For example, the binding agent can be coupled to beads and the binding reaction between the beads and vesicle can be performed in a microfluidic device. Multiplexing can also be performed using a microfluidic device. Different compartments can comprise different binding agents for different populations of vesicles, where each population is of a different cell-of-origin specific vesicle population. In one embodiment, each population has a different biosignature. The hybridization reaction between the microsphere and vesicle can be performed in a microfluidic device and the reaction mixture can be delivered to a detection device. The detection device, such as a dual or multiple laser detection system can be part of the microfluidic system and can use a laser to identify each bead or microsphere by its color-coding, and another laser can detect the hybridization signal associated with each bead.

[0151] Any appropriate microfluidic device can be used in the methods of the invention. Examples of microfluidic devices that may be used, or adapted for use with vesicles, include but are not limited to those described in U.S. Pat. Nos. 7,591,936, 7,581,429, 7,579,136, 7,575,722, 7,568,399, 7,552,741, 7,544,506, 7,541,578, 7,518,726, 7,488,596, 7,485,214, 7,467,928, 7,452,713, 7,452,509, 7,449,096, 7,431,887, 7,422,725, 7,422,669, 7,419,822, 7,419,639, 7,413,709, 7,411,184, 7,402,229, 7,390,463, 7,381,471, 7,357,864, 7,351,592, 7,351,380, 7,338,637, 7,329,391, 7,323,140, 7,261,824, 7,258,837, 7,253,003, 7,238,324, 7,238,255, 7,233,865, 7,229,538, 7,201,881, 7,195,986, 7,189,581, 7,189,580, 7,189,368, 7,141,978, 7,138,062, 7,135,147, 7,125,711, 7,118,910, 7,118,661, 7,640,947, 7,666,361, 7,704,735; and International Patent Publication WO 2010/072410; each of which patents or applications are incorporated herein by reference in their entirety. Another example for use with methods disclosed herein is described in Chen et al., “Microfluidic isolation and transcriptome analysis of serum vesicles,” Lab on a Chip, Dec. 8, 2009 DOI: 10.1039/b916199f.

[0152] Other microfluidic devices for use with the invention include devices comprising elastomeric layers, valves and pumps, including without limitation those disclosed in U.S. Pat. Nos. 5,376,252, 6,408,878, 6,645,432, 6,719,868, 6,793,753, 6,899,137, 6,929,030, 7,040,338, 7,118,910, 7,144,616, 7,216,671, 7,250,128, 7,494,555, 7,501,245, 7,601,270, 7,691,333, 7,754,010, 7,837,946; U.S. Patent Application Nos. 2003/0061687, 2005/0084421, 2005/0112882, 2005/0129581, 2005/0145496, 2005/0201901, 2005/0214173, 2005/0252773, 2006/0006067; and EP Patent Nos. 0527905 and 1065378; each of which application is herein incorporated by reference. In some instances, much or all of the devices are composed of elastomeric material. Certain devices are designed to conduct thermal cycling reactions (e.g., PCR) with devices that include one or more elastomeric valves to regulate solution flow through the device. The devices can comprise arrays of reaction sites thereby allowing a plurality of reactions to be performed. Thus, the devices can be used to assess circulating microRNAs in a multiplex fashion, including microRNAs isolated from vesicles. In an embodiment, the microfluidic device comprises (a) a first plurality of flow channels formed in an elastomeric substrate; (b) a second plurality of flow channels formed in the elastomeric substrate that intersect the first plurality of flow channels to define an array of reaction sites, each reaction site located at an intersection of one of the first and second flow channels; (c) a plurality of isolation valves disposed along the first and second plurality of flow channels and spaced between the reaction sites that can be actuated to isolate a solution within each of the reaction sites from solutions at other reaction sites, wherein the isolation valves comprise one or more control channels that each overlay and intersect one or more of the flow channels; and (d) means for simultaneously actuating the valves for isolating the reaction sites from each other. Various modifications to the basic structure of the device are envisioned within the scope of the invention. MicroRNAs can be detected in each of the reaction sites by using PCR methods. For example, the method can comprise the steps of the steps of: (i) providing a microfluidic device, the microfluidic device comprising: a first fluidic channel having a first end and a second end in fluid communication with each other through the channel; a plurality of flow channels, each flow channel terminating at a terminal wall; wherein each flow channel branches from and is in fluid communication with the first fluidic channel, wherein an aqueous fluid that enters one of the flow channels from the first fluidic channel can flow out of the flow channel only through the first fluidic channel; and, an inlet in fluid communication with the first fluidic channel, the inlet for introducing a sample fluid; wherein each flow channel is associated with a valve that when closed isolates one end of the flow channel from the first fluidic channel, whereby an isolated reaction site is formed between the valve and the terminal wall; a control channel; wherein each the valve is a deflectable membrane which is deflected into the flow channel associated with the valve when an actuating force is applied to the control channel, thereby closing the valve; and wherein when the actuating force is applied to the control channel a valve in each of the flow channels is closed, so as to produce the isolated reaction site in each flow channel; (ii) introducing the sample fluid into the inlet, the sample fluid filling the flow channels; (iii) actuating the valve to separate the sample fluid into the separate portions within the flow channels; (iv) amplifying the nucleic acid in the sample fluid; (v) analyzing the portions of the sample fluid to determine whether the amplifying produced the reaction. The sample fluid can contain an amplifiable nucleic acid target, e.g., a microRNA, and the conditions can be polymerase chain reaction (PCR) conditions, so that the reaction results in a PCR product being formed.

[0153] The microfluidic device can have one or more binding agents attached to a surface in a channel, or present in a channel. For example, the microchannel can have one or more capture agents, such as a capture agent for a tissue related antigen in Table 4, one or more general microvesicle antigen in Table 3 or a cell-of-origin or cancer related antigen in Table 4, including without limitation EpCam, CD9, CD63, CD81, B7H3, ICAM, STEAP, KLK2, SSX2, SSX4, PBP, SPDEF, and EGFR. The capture agent may be an aptamer selected by the methods of the invention. The surface of the channel can also be contacted with a blocking aptamer. In one embodiment, a microchannel surface is treated with avidin and a capture agent, such as an antibody, that is biotinylated can be injected into the channel to bind the avidin. In other embodiments, the capture agents are present in chambers or other components of a microfluidic device. The capture agents can also be attached to beads that can be manipulated to move through the microfluidic channels. In one embodiment, the capture agents are attached to magnetic beads. The beads can be manipulated using magnets.

[0154] A biological sample can be flowed into the microfluidic device, or a microchannel, at rates such as at least about 1, 2, 3, 4, 5, 6, 7, 8, 9, 10, 11, 12, 13, 14, 15, 16, 17, 18, 19, 20, 25, 30, 35, 40, 45, or 50 μl per minute, such as between about 1-50, 5-40, 5-30, 3-20 or 5-15 μl per minute. One or more vesicles can be captured and directly detected in the microfluidic device. Alternatively, the captured vesicle may be released and exit the microfluidic device prior to analysis. In another embodiment, one or more captured vesicles are lysed in the microchannel and the lysate can be analyzed, e.g., to examine payload within the vesicles. Lysis buffer can be flowed through the channel and lyse the captured vesicles. For example, the lysis buffer can be flowed into the device or microchannel at rates such as at least about a, 2, 3, 4, 5, 6, 7, 8, 9, 10, 11, 12, 13, 14, 15, 16, 17, 18, 19, 20, 25, 26, 27, 28, 29, 30, 35, 40, 45, or 50 μl per minute, such as between about 1-50, 5-40, 10-30, 5-30 or 10-35 μl per minute. The lysate can be collected and analyzed, such as performing RT-PCR, PCR, mass spectrometry, Western blotting, or other assays, to detect one or more biomarkers of the vesicle.

### Phenotypes

[0155] Disclosed herein are products and processes for characterizing a phenotype using the methods and compositions of the invention. The term “phenotype” as used herein can mean any trait or characteristic that is attributed to a biomarker profile that is identified using in part or in whole the compositions and/or methods of the invention. For example, a phenotype can be a diagnostic, prognostic or theranostic determination based on a characterized biomarker profile for a sample obtained from a subject. A phenotype can be any observable characteristic or trait of, such as a disease or condition, a stage of a disease or condition, susceptibility to a disease or condition, prognosis of a disease stage or condition, a physiological state, or response/potential response to therapeutics. A phenotype can result from a subject's genetic makeup as well as the influence of environmental factors and the interactions between the two, as well as from epigenetic modifications to nucleic acid sequences.

[0156] A phenotype in a subject can be characterized by obtaining a biological sample from a subject and analyzing the sample using the compositions and/or methods of the invention. For example, characterizing a phenotype for a subject or individual can include detecting a disease or condition (including pre-symptomatic early stage detecting), determining a prognosis, diagnosis, or theranosis of a disease or condition, or determining the stage or progression of a disease or condition. Characterizing a phenotype can include identifying appropriate treatments or treatment efficacy for specific diseases, conditions, disease stages and condition stages, predictions and likelihood analysis of disease progression, particularly disease recurrence, metastatic spread or disease relapse. A phenotype can also be a clinically distinct type or subtype of a condition or disease, such as a cancer or tumor. Phenotype determination can also be a determination of a physiological condition, or an assessment of organ distress or organ rejection, such as post-transplantation. The compositions and methods described herein allow assessment of a subject on an individual basis, which can provide benefits of more efficient and economical decisions in treatment.

[0157] In an aspect, the invention relates to the analysis of biomarkers such as microvesicles to provide a diagnosis, prognosis, and/or theranosis of a disease or condition. Theranostics includes diagnostic testing that provides the ability to affect therapy or treatment of a disease or disease state. Theranostics testing provides a theranosis in a similar manner that diagnostics or prognostic testing provides a diagnosis or prognosis, respectively. As used herein, theranostics encompasses any desired form of therapy related testing, including predictive medicine, personalized medicine, integrated medicine, pharmacodiagnostics and Dx/Rx partnering. Therapy related tests can be used to predict and assess drug response in individual subjects, i.e., to provide personalized medicine. Predicting a drug response can be determining whether a subject is a likely responder or a likely non-responder to a candidate therapeutic agent, e.g., before the subject has been exposed or otherwise treated with the treatment. Assessing a drug response can be monitoring a response to a drug, e.g., monitoring the subject's improvement or lack thereof over a time course after initiating the treatment. Therapy related tests are useful to select a subject for treatment who is particularly likely to benefit from the treatment or to provide an early and objective indication of treatment efficacy in an individual subject. Thus, analysis using the compositions and methods of the invention may indicate that treatment should be altered to select a more promising treatment, thereby avoiding the great expense of delaying beneficial treatment and avoiding the financial and morbidity costs of administering an ineffective drug(s).

[0158] Thus, the compositions and methods of the invention may help predict whether a subject is likely to respond to a treatment for a disease or disorder. Characterizating a phenotype includes predicting the responder/non-responder status of the subject, wherein a responder responds to a treatment for a disease and a non-responder does not respond to the treatment. Biomarkers such as microvesicles can be analyzed in the subject and compared against that of previous subjects that were known to respond or not to a treatment. If the biomarker profile in the subject more closely aligns with that of previous subjects that were known to respond to the treatment, the subject can be characterized, or predicted, as a responder to the treatment. Similarly, if the biomarker profile in the subject more closely aligns with that of previous subjects that did not respond to the treatment, the subject can be characterized, or predicted as a non-responder to the treatment. The treatment can be for any appropriate disease, disorder or other condition, including without limitation those disclosed herein.

[0159] In some embodiments, the phenotype comprises a disease or condition such as those listed in Tables 1 or 16. For example, the phenotype can comprise detecting the presence of or likelihood of developing a tumor, neoplasm, or cancer, or characterizing the tumor, neoplasm, or cancer (e.g., stage, grade, aggressiveness, likelihood of metastasis or recurrence, etc). Cancers that can be detected or assessed by methods or compositions described herein include, but are not limited to, breast cancer, ovarian cancer, lung cancer, colon cancer, hyperplastic polyp, adenoma, colorectal cancer, high grade dysplasia, low grade dysplasia, prostatic hyperplasia, prostate cancer, melanoma, pancreatic cancer, brain cancer (such as a glioblastoma), hematological malignancy, hepatocellular carcinoma, cervical cancer, endometrial cancer, head and neck cancer, esophageal cancer, gastrointestinal stromal tumor (GIST), renal cell carcinoma (RCC) or gastric cancer. The colorectal cancer can be CRC Dukes B or Dukes C-D. The hematological malignancy can be B-Cell Chronic Lymphocytic Leukemia, B-Cell Lymphoma-DLBCL, B-Cell Lymphoma-DLBCL-germinal center-like, B-Cell Lymphoma-DLBCL-activated B-cell-like, and Burkitt's lymphoma.

[0160] The phenotype can be a premalignant condition, such as actinic keratosis, atrophic gastritis, leukoplakia, erythroplasia, Lymphomatoid Granulomatosis, preleukemia, fibrosis, cervical dysplasia, uterine cervical dysplasia, xeroderma pigmentosum, Barrett's Esophagus, colorectal polyp, or other abnormal tissue growth or lesion that is likely to develop into a malignant tumor. Transformative viral infections such as HIV and HPV also present phenotypes that can be assessed according to the invention.

[0161] A cancer characterized by the methods of the invention can comprise, without limitation, a carcinoma, a sarcoma, a lymphoma or leukemia, a germ cell tumor, a blastoma, or other cancers. Carcinomas include without limitation epithelial neoplasms, squamous cell neoplasms squamous cell carcinoma, basal cell neoplasms basal cell carcinoma, transitional cell papillomas and carcinomas, adenomas and adenocarcinomas (glands), adenoma, adenocarcinoma, linitis plastica insulinoma, glucagonoma, gastrinoma, vipoma, cholangiocarcinoma, hepatocellular carcinoma, adenoid cystic carcinoma, carcinoid tumor of appendix, prolactinoma, oncocytoma, hurthle cell adenoma, renal cell carcinoma, grawitz tumor, multiple endocrine adenomas, endometrioid adenoma, adnexal and skin appendage neoplasms, mucoepidermoid neoplasms, cystic, mucinous and serous neoplasms, cystadenoma, pseudomyxoma peritonei, ductal, lobular and medullary neoplasms, acinar cell neoplasms, complex epithelial neoplasms, warthin's tumor, thymoma, specialized gonadal neoplasms, sex cord stromal tumor, thecoma, granulosa cell tumor, arrhenoblastoma, sertoli leydig cell tumor, glomus tumors, paraganglioma, pheochromocytoma, glomus tumor, nevi and melanomas, melanocytic nevus, malignant melanoma, melanoma, nodular melanoma, dysplastic nevus, lentigo maligna melanoma, superficial spreading melanoma, and malignant acral lentiginous melanoma. Sarcoma includes without limitation Askin's tumor, botryodies, chondrosarcoma, Ewing's sarcoma, malignant hemangio endothelioma, malignant schwannoma, osteosarcoma, soft tissue sarcomas including: alveolar soft part sarcoma, angiosarcoma, cystosarcoma phyllodes, dermatofibrosarcoma, desmoid tumor, desmoplastic small round cell tumor, epithelioid sarcoma, extraskeletal chondrosarcoma, extraskeletal osteosarcoma, fibrosarcoma, hemangiopericytoma, hemangiosarcoma, kaposi's sarcoma, leiomyosarcoma, liposarcoma, lymphangiosarcoma, lymphosarcoma, malignant fibrous histiocytoma, neurofibrosarcoma, rhabdomyosarcoma, and synovialsarcoma. Lymphoma and leukemia include without limitation chronic lymphocytic leukemia/small lymphocytic lymphoma, B-cell prolymphocytic leukemia, lymphoplasmacytic lymphoma (such as waldenstrom macroglobulinemia), splenic marginal zone lymphoma, plasma cell myeloma, plasmacytoma, monoclonal immunoglobulin deposition diseases, heavy chain diseases, extranodal marginal zone B cell lymphoma, also called malt lymphoma, nodal marginal zone B cell lymphoma (nmzl), follicular lymphoma, mantle cell lymphoma, diffuse large B cell lymphoma, mediastinal (thymic) large B cell lymphoma, intravascular large B cell lymphoma, primary effusion lymphoma, burkitt lymphoma/leukemia, T cell prolymphocytic leukemia, T cell large granular lymphocytic leukemia, aggressive NK cell leukemia, adult T cell leukemia/lymphoma, extranodal NK/T cell lymphoma, nasal type, enteropathy-type T cell lymphoma, hepatosplenic T cell lymphoma, blastic NK cell lymphoma, mycosis fungoides/sezary syndrome, primary cutaneous CD30-positive T cell lymphoproliferative disorders, primary cutaneous anaplastic large cell lymphoma, lymphomatoid papulosis, angioimmunoblastic T cell lymphoma, peripheral T cell lymphoma, unspecified, anaplastic large cell lymphoma, classical hodgkin lymphomas (nodular sclerosis, mixed cellularity, lymphocyte-rich, lymphocyte depleted or not depleted), and nodular lymphocyte-predominant hodgkin lymphoma. Germ cell tumors include without limitation germinoma, dysgerminoma, seminoma, nongerminomatous germ cell tumor, embryonal carcinoma, endodermal sinus turmor, choriocarcinoma, teratoma, polyembryoma, and gonadoblastoma. Blastoma includes without limitation nephroblastoma, medulloblastoma, and retinoblastoma. Other cancers include without limitation labial carcinoma, larynx carcinoma, hypopharynx carcinoma, tongue carcinoma, salivary gland carcinoma, gastric carcinoma, adenocarcinoma, thyroid cancer (medullary and papillary thyroid carcinoma), renal carcinoma, kidney parenchyma carcinoma, cervix carcinoma, uterine corpus carcinoma, endometrium carcinoma, chorion carcinoma, testis carcinoma, urinary carcinoma, melanoma, brain tumors such as glioblastoma, astrocytoma, meningioma, medulloblastoma and peripheral neuroectodermal tumors, gall bladder carcinoma, bronchial carcinoma, multiple myeloma, basalioma, teratoma, retinoblastoma, choroidea melanoma, seminoma, rhabdomyosarcoma, craniopharyngeoma, osteosarcoma, chondrosarcoma, myosarcoma, liposarcoma, fibrosarcoma, Ewing sarcoma, and plasmocytoma.

[0162] In a further embodiment, the cancer under analysis may be a lung cancer including non-small cell lung cancer and small cell lung cancer (including small cell carcinoma (oat cell cancer), mixed small cell/large cell carcinoma, and combined small cell carcinoma), colon cancer, breast cancer, prostate cancer, liver cancer, pancreas cancer, brain cancer, kidney cancer, ovarian cancer, stomach cancer, skin cancer, bone cancer, gastric cancer, breast cancer, pancreatic cancer, glioma, glioblastoma, hepatocellular carcinoma, papillary renal carcinoma, head and neck squamous cell carcinoma, leukemia, lymphoma, myeloma, or a solid tumor.

[0163] In embodiments, the cancer comprises an acute lymphoblastic leukemia; acute myeloid leukemia; adrenocortical carcinoma; AIDS-related cancers; AIDS-related lymphoma; anal cancer; appendix cancer; astrocytomas; atypical teratoid/rhabdoid tumor; basal cell carcinoma; bladder cancer; brain stem glioma; brain tumor (including brain stem glioma, central nervous system atypical teratoid/rhabdoid tumor, central nervous system embryonal tumors, astrocytomas, craniopharyngioma, ependymoblastoma, ependymoma, medulloblastoma, medulloepithelioma, pineal parenchymal tumors of intermediate differentiation, supratentorial primitive neuroectodermal tumors and pineoblastoma); breast cancer; bronchial tumors; Burkitt lymphoma; cancer of unknown primary site; carcinoid tumor; carcinoma of unknown primary site; central nervous system atypical teratoid/rhabdoid tumor; central nervous system embryonal tumors; cervical cancer; childhood cancers; chordoma; chronic lymphocytic leukemia; chronic myelogenous leukemia; chronic myeloproliferative disorders; colon cancer; colorectal cancer; craniopharyngioma; cutaneous T-cell lymphoma; endocrine pancreas islet cell tumors; endometrial cancer; ependymoblastoma; ependymoma; esophageal cancer; esthesioneuroblastoma; Ewing sarcoma; extracranial germ cell tumor; extragonadal germ cell tumor; extrahepatic bile duct cancer; gallbladder cancer; gastric (stomach) cancer; gastrointestinal carcinoid tumor; gastrointestinal stromal cell tumor; gastrointestinal stromal tumor (GIST); gestational trophoblastic tumor; glioma; hairy cell leukemia; head and neck cancer; heart cancer; Hodgkin lymphoma; hypopharyngeal cancer; intraocular melanoma; islet cell tumors; Kaposi sarcoma; kidney cancer; Langerhans cell histiocytosis; laryngeal cancer; lip cancer; liver cancer; malignant fibrous histiocytoma bone cancer; medulloblastoma; medulloepithelioma; melanoma; Merkel cell carcinoma; Merkel cell skin carcinoma; mesothelioma; metastatic squamous neck cancer with occult primary; mouth cancer; multiple endocrine neoplasia syndromes; multiple myeloma; multiple myeloma/plasma cell neoplasm; mycosis fungoides; myelodysplastic syndromes; myeloproliferative neoplasms; nasal cavity cancer; nasopharyngeal cancer; neuroblastoma; Non-Hodgkin lymphoma; nonmelanoma skin cancer; non-small cell lung cancer; oral cancer; oral cavity cancer; oropharyngeal cancer; osteosarcoma; other brain and spinal cord tumors; ovarian cancer; ovarian epithelial cancer; ovarian germ cell tumor; ovarian low malignant potential tumor; pancreatic cancer; papillomatosis; paranasal sinus cancer; parathyroid cancer; pelvic cancer; penile cancer; pharyngeal cancer; pineal parenchymal tumors of intermediate differentiation; pineoblastoma; pituitary tumor; plasma cell neoplasm/multiple myeloma; pleuropulmonary blastoma; primary central nervous system (CNS) lymphoma; primary hepatocellular liver cancer; prostate cancer; rectal cancer; renal cancer; renal cell (kidney) cancer; renal cell cancer; respiratory tract cancer; retinoblastoma; rhabdomyosarcoma; salivary gland cancer; Sézary syndrome; small cell lung cancer; small intestine cancer; soft tissue sarcoma; squamous cell carcinoma; squamous neck cancer; stomach (gastric) cancer; supratentorial primitive neuroectodermal tumors; T-cell lymphoma; testicular cancer; throat cancer; thymic carcinoma; thymoma; thyroid cancer; transitional cell cancer; transitional cell cancer of the renal pelvis and ureter; trophoblastic tumor; ureter cancer; urethral cancer; uterine cancer; uterine sarcoma; vaginal cancer; vulvar cancer; Waldenström macroglobulinemia; or Wilm's tumor. The methods of the invention can be used to characterize these and other cancers. Thus, characterizing a phenotype can be providing a diagnosis, prognosis or theranosis of one of the cancers disclosed herein.

[0164] In some embodiments, the cancer comprises an acute myeloid leukemia (AML), breast carcinoma, cholangiocarcinoma, colorectal adenocarcinoma, extrahepatic bile duct adenocarcinoma, female genital tract malignancy, gastric adenocarcinoma, gastroesophageal adenocarcinoma, gastrointestinal stromal tumors (GIST), glioblastoma, head and neck squamous carcinoma, leukemia, liver hepatocellular carcinoma, low grade glioma, lung bronchioloalveolar carcinoma (BAC), lung non-small cell lung cancer (NSCLC), lung small cell cancer (SCLC), lymphoma, male genital tract malignancy, malignant solitary fibrous tumor of the pleura (MSFT), melanoma, multiple myeloma, neuroendocrine tumor, nodal diffuse large B-cell lymphoma, non epithelial ovarian cancer (non-EOC), ovarian surface epithelial carcinoma, pancreatic adenocarcinoma, pituitary carcinomas, oligodendroglioma, prostatic adenocarcinoma, retroperitoneal or peritoneal carcinoma, retroperitoneal or peritoneal sarcoma, small intestinal malignancy, soft tissue tumor, thymic carcinoma, thyroid carcinoma, or uveal melanoma. The methods of the invention can be used to characterize these and other cancers. Thus, characterizing a phenotype can be providing a diagnosis, prognosis or theranosis of one of the cancers disclosed herein.

[0165] The phenotype can also be an inflammatory disease, immune disease, or autoimmune disease. For example, the disease may be inflammatory bowel disease (IBD), Crohn's disease (CD), ulcerative colitis (UC), pelvic inflammation, vasculitis, psoriasis, diabetes, autoimmune hepatitis, Multiple Sclerosis, Myasthenia Gravis, Type I diabetes, Rheumatoid Arthritis, Psoriasis, Systemic Lupus Erythematosis (SLE), Hashimoto's Thyroiditis, Grave's disease, Ankylosing Spondylitis Sjogrens Disease, CREST syndrome, Scleroderma, Rheumatic Disease, organ rejection, Primary Sclerosing Cholangitis, or sepsis.

[0166] The phenotype can also comprise a cardiovascular disease, such as atherosclerosis, congestive heart failure, vulnerable plaque, stroke, or ischemia. The cardiovascular disease or condition can be high blood pressure, stenosis, vessel occlusion or a thrombotic event.

[0167] The phenotype can also comprise a neurological disease, such as Multiple Sclerosis (MS), Parkinson's Disease (PD), Alzheimer's Disease (AD), schizophrenia, bipolar disorder, depression, autism, Prion Disease, Pick's disease, dementia, Huntington disease (HD), Down's syndrome, cerebrovascular disease, Rasmussen's encephalitis, viral meningitis, neurospsychiatric systemic lupus erythematosus (NPSLE), amyotrophic lateral sclerosis, Creutzfeldt-Jacob disease, Gerstmann-Straussler-Scheinker disease, transmissible spongiform encephalopathy, ischemic reperfusion damage (e.g. stroke), brain trauma, microbial infection, or chronic fatigue syndrome. The phenotype may also be a condition such as fibromyalgia, chronic neuropathic pain, or peripheral neuropathic pain.

[0168] The phenotype may also comprise an infectious disease, such as a bacterial, viral or yeast infection. For example, the disease or condition may be Whipple's Disease, Prion Disease, cirrhosis, methicillin-resistant Staphylococcus aureus, HIV, hepatitis, syphilis, meningitis, malaria, tuberculosis, or influenza. Viral proteins, such as HIV or HCV-like particles can be assessed in a vesicle, to characterize a viral condition.

[0169] The phenotype can also comprise a perinatal or pregnancy related condition (e.g. preeclampsia or preterm birth), metabolic disease or condition, such as a metabolic disease or condition associated with iron metabolism. For example, hepcidin can be assayed in a vesicle to characterize an iron deficiency. The metabolic disease or condition can also be diabetes, inflammation, or a perinatal condition.

[0170] The compositions and methods of the invention can be used to characterize these and other diseases and disorders that can be assessed via biomarkers. Thus, characterizing a phenotype can be providing a diagnosis, prognosis or theranosis of one of the diseases and disorders disclosed herein.

### Subject

[0171] One or more phenotypes of a subject can be determined by analyzing one or more vesicles, such as vesicles, in a biological sample obtained from the subject. A subject or patient can include, but is not limited to, mammals such as bovine, avian, canine, equine, feline, ovine, porcine, or primate animals (including humans and non-human primates). A subject can also include a mammal of importance due to being endangered, such as a Siberian tiger; or economic importance, such as an animal raised on a farm for consumption by humans, or an animal of social importance to humans, such as an animal kept as a pet or in a zoo. Examples of such animals include, but are not limited to, carnivores such as cats and dogs; swine including pigs, hogs and wild boars; ruminants or ungulates such as cattle, oxen, sheep, giraffes, deer, goats, bison, camels or horses. Also included are birds that are endangered or kept in zoos, as well as fowl and more particularly domesticated fowl, i.e. poultry, such as turkeys and chickens, ducks, geese, guinea fowl. Also included are domesticated swine and horses (including race horses). In addition, any animal species connected to commercial activities are also included such as those animals connected to agriculture and aquaculture and other activities in which disease monitoring, diagnosis, and therapy selection are routine practice in husbandry for economic productivity and/or safety of the food chain.

[0172] The subject can have a pre-existing disease or condition, such as cancer. Alternatively, the subject may not have any known pre-existing condition. The subject may also be non-responsive to an existing or past treatment, such as a treatment for cancer.

### Samples

[0173] A sample used and/or assessed via the compositions and methods of the invention includes any relevant biological sample that can be used for biomarker assessment, including without limitation sections of tissues such as biopsy or tissue removed during surgical or other procedures, bodily fluids, autopsy samples, frozen sections taken for histological purposes, and cell cultures. Such samples include blood and blood fractions or products (e.g., serum, buffy coat, plasma, platelets, red blood cells, and the like), sputum, malignant effusion, cheek cells tissue, cultured cells (e.g., primary cultures, explants, and transformed cells), stool, urine, other biological or bodily fluids (e.g., prostatic fluid, gastric fluid, intestinal fluid, renal fluid, lung fluid, cerebrospinal fluid, and the like), etc. The sample can comprise biological material that is a fresh frozen & formalin fixed paraffin embedded (FFPE) block, formalin-fixed paraffin embedded, or is within an RNA preservative+formalin fixative. More than one sample of more than one type can be used for each patient.

[0174] The sample used in the methods described herein can be a formalin fixed paraffin embedded (FFPE) sample. The FFPE sample can be one or more of fixed tissue, unstained slides, bone marrow core or clot, core needle biopsy, malignant fluids and fine needle aspirate (FNA). In an embodiment, the fixed tissue comprises a tumor containing formalin fixed paraffin embedded (FFPE) block from a surgery or biopsy. In another embodiment, the unstained slides comprise unstained, charged, unbaked slides from a paraffin block. In another embodiment, bone marrow core or clot comprises a decalcified core. A formalin fixed core and/or clot can be paraffin-embedded. In still another embodiment, the core needle biopsy comprises 1, 2, 3, 4, 5, 6, 7, 8, 9, 10 or more, e.g., 3-4, paraffin embedded biopsy samples. An 18 gauge needle biopsy can be used. The malignant fluid can comprise a sufficient volume of fresh pleural/ascitic fluid to produce a 5×5×2 mm cell pellet. The fluid can be formalin fixed in a paraffin block. In an embodiment, the core needle biopsy comprises 1, 2, 3, 4, 5, 6, 7, 8, 9, 10 or more, e.g., 4-6, paraffin embedded aspirates.

[0175] A sample may be processed according to techniques understood by those in the art. A sample can be without limitation fresh, frozen or fixed cells or tissue. In some embodiments, a sample comprises formalin-fixed paraffin-embedded (FFPE) tissue, fresh tissue or fresh frozen (FF) tissue. A sample can comprise cultured cells, including primary or immortalized cell lines derived from a subject sample. A sample can also refer to an extract from a sample from a subject. For example, a sample can comprise DNA, RNA or protein extracted from a tissue or a bodily fluid. Many techniques and commercial kits are available for such purposes. The fresh sample from the individual can be treated with an agent to preserve RNA prior to further processing, e.g., cell lysis and extraction. Samples can include frozen samples collected for other purposes. Samples can be associated with relevant information such as age, gender, and clinical symptoms present in the subject; source of the sample; and methods of collection and storage of the sample. A sample is typically obtained from a subject.

[0176] A biopsy comprises the process of removing a tissue sample for diagnostic or prognostic evaluation, and to the tissue specimen itself. Any biopsy technique known in the art can be applied to the molecular profiling methods of the present invention. The biopsy technique applied can depend on the tissue type to be evaluated (e.g., colon, prostate, kidney, bladder, lymph node, liver, bone marrow, blood cell, lung, breast, etc.), the size and type of the tumor (e.g., solid or suspended, blood or ascites), among other factors. Representative biopsy techniques include, but are not limited to, excisional biopsy, incisional biopsy, needle biopsy, surgical biopsy, and bone marrow biopsy. An “excisional biopsy” refers to the removal of an entire tumor mass with a small margin of normal tissue surrounding it. An “incisional biopsy” refers to the removal of a wedge of tissue that includes a cross-sectional diameter of the tumor. Molecular profiling can use a “core-needle biopsy” of the tumor mass, or a “fine-needle aspiration biopsy” which generally obtains a suspension of cells from within the tumor mass. Biopsy techniques are discussed, for example, in Harrison's Principles of Internal Medicine, Kasper, et al., eds., 16th ed., 2005, Chapter 70, and throughout Part V.

[0177] Standard molecular biology techniques known in the art and not specifically described are generally followed as in Sambrook et al., Molecular Cloning: A Laboratory Manual, Cold Spring Harbor Laboratory Press, New York (1989), and as in Ausubel et al., Current Protocols in Molecular Biology, John Wiley and Sons, Baltimore, Md. (1989) and as in Perbal, A Practical Guide to Molecular Cloning, John Wiley & Sons, New York (1988), and as in Watson et al., Recombinant DNA, Scientific American Books, New York and in Birren et al (eds) Genome Analysis: A Laboratory Manual Series, Vols. 1-4 Cold Spring Harbor Laboratory Press, New York (1998) and methodology as set forth in U.S. Pat. Nos. 4,666,828; 4,683,202; 4,801,531; 5,192,659 and 5,272,057 and incorporated herein by reference. Polymerase chain reaction (PCR) can be carried out generally as in PCR Protocols: A Guide to Methods and Applications, Academic Press, San Diego, Calif. (1990).

[0178] The biological sample assessed using the compositions and methods of the invention can be any useful bodily or biological fluid, including but not limited to peripheral blood, sera, plasma, ascites, urine, cerebrospinal fluid (CSF), sputum, saliva, bone marrow, synovial fluid, aqueous humor, amniotic fluid, cerumen, breast milk, broncheoalveolar lavage fluid, semen (including prostatic fluid), Cowper's fluid or pre-ejaculatory fluid, female ejaculate, sweat, fecal matter, hair, tears, cyst fluid, pleural and peritoneal fluid, pericardial fluid, lymph, chyme, chyle, bile, interstitial fluid, menses, pus, sebum, vomit, vaginal secretions, mucosal secretion, stool water, pancreatic juice, lavage fluids from sinus cavities, bronchopulmonary aspirates or other lavage fluids, cells, cell culture, or a cell culture supernatant. A biological sample may also include the blastocyl cavity, umbilical cord blood, or maternal circulation which may be of fetal or maternal origin. The biological sample may also be a cell culture, tissue sample or biopsy from which vesicles and other circulating biomarkers may be obtained. For example, cells of interest can be cultured and vesicles isolated from the culture. In various embodiments, biomarkers or more particularly biosignatures disclosed herein can be assessed directly from such biological samples (e.g., identification of presence or levels of nucleic acid or polypeptide biomarkers or functional fragments thereof) using various methods, such as extraction of nucleic acid molecules from blood, plasma, serum or any of the foregoing biological samples, use of protein or antibody arrays to identify polypeptide (or functional fragment) biomarker(s), as well as other array, sequencing, PCR and proteomic techniques known in the art for identification and assessment of nucleic acid and polypeptide molecules. In addition, one or more components present in such samples can be first isolated or enriched and further processed to assess the presence or levels of selected biomarkers, to assess a given biosignature (e.g., isolated microvesicles prior to profiling for protein and/or nucleic acid biomarkers).

[0179] Table 1 presents a non-limiting listing of diseases, conditions, or biological states and corresponding biological samples that may be used for analysis according to the methods of the invention.

TABLE 1
Examples of Biological Samples for Various Diseases, Conditions, or Biological States

| Illustrative Disease, Condition or Biological | |
|---|---|
| State | Illustrative Biological Samples |
| Cancers/neoplasms affecting the following tissue | Tumor, blood, serum, plasma, cerebrospinal fluid |
| types/bodily systems: breast, lung, ovarian, colon, | (CSF), urine, sputum, ascites, synovial fluid, |
| rectal, prostate, pancreatic, brain, bone, connective | semen, nipple aspirates, saliva, bronchoalveolar |
| tissue, glands, skin, lymph, nervous system, | lavage fluid, tears, oropharyngeal washes, feces, |
| endocrine, germ cell, genitourinary, | peritoneal fluids, pleural effusion, sweat, tears, |
| hematologic/blood, bone marrow, muscle, eye, | aqueous humor, pericardial fluid, lymph, chyme, |
| esophageal, fat tissue, thyroid, pituitary, spinal | chyle, bile, stool water, amniotic fluid, breast milk, |
| cord, bile duct, heart, gall bladder, bladder, testes, | pancreatic juice, cerumen, Cowper's fluid or pre- |
| cervical, endometrial, renal, ovarian, | ejaculatory fluid, female ejaculate, interstitial fluid, |
| digestive/gastrointestinal, stomach, head and neck, | menses, mucus, pus, sebum, vaginal lubrication, |
| liver, leukemia, respiratory/thorasic, cancers of | vomit |
| unknown primary (CUP) | |
| Neurodegenerative/neurological disorders: | Blood, serum, plasma, CSF, urine |
| Parkinson's disease, Alzheimer's Disease and | |
| multiple sclerosis, Schizophrenia, and bipolar | |
| disorder, spasticity disorders, epilepsy | |
| Cardiovascular Disease: atherosclerosis, | Blood, serum, plasma, CSF, urine |
| cardiomyopathy, endocarditis, vunerable plaques, | |
| infection | |
| Stroke: ischemic, intracerebral hemorrhage, | Blood, serum, plasma, CSF, urine |
| subarachnoid hemorrhage, transient ischemic | |
| attacks (TIA) | |
| Pain disorders: peripheral neuropathic pain and | Blood, serum, plasma, CSF, urine |
| chronic neuropathic pain, and fibromyalgia, | |
| Autoimmune disease: systemic and localized | Blood, serum, plasma, CSF, urine, synovial fluid |
| diseases, rheumatic disease, Lupus, Sjogren's | |
| syndrome | |
| Digestive system abnormalities: Barrett's | Blood, serum, plasma, CSF, urine |
| esophagus, irritable bowel syndrome, ulcerative | |
| colitis, Crohn's disease, Diverticulosis and | |
| Diverticulitis, Celiac Disease | |
| Endocrine disorders: diabetes mellitus, various | Blood, serum, plasma, CSF, urine |
| forms of Thyroiditis, adrenal disorders, pituitary | |
| disorders | |
| Diseases and disorders of the skin: psoriasis | Blood, serum, plasma, CSF, urine, synovial fluid, |
| | tears |
| Urological disorders: benign prostatic hypertrophy | Blood, serum, plasma, urine |
| (BPH), polycystic kidney disease, interstitial | |
| cystitis | |
| Hepatic disease/injury: Cirrhosis, induced | Blood, serum, plasma, urine |
| hepatotoxicity (due to exposure to natural or | |
| synthetic chemical sources) | |
| Kidney disease/injury: acute, sub-acute, chronic | Blood, serum, plasma, urine |
| conditions, Podocyte injury, focal segmental | |
| glomerulosclerosis | |
| Endometriosis | Blood, serum, plasma, urine, vaginal fluids |
| Osteoporosis | Blood, serum, plasma, urine, synovial fluid |
| Pancreatitis | Blood, serum, plasma, urine, pancreatic juice |
| Asthma | Blood, serum, plasma, urine, sputum, bronchiolar |
| | lavage fluid |
| Allergies | Blood, serum, plasma, urine, sputum, bronchiolar |
| | lavage fluid |
| Prion-related diseases | Blood, serum, plasma, CSF, urine |
| Viral Infections: HIV/AIDS | Blood, serum, plasma, urine |
| Sepsis | Blood, serum, plasma, urine, tears, nasal lavage |
| Organ rejection/transplantation | Blood, serum, plasma, urine, various lavage fluids |
| Differentiating conditions: adenoma versus | Blood, serum, plasma, urine, sputum, feces, colonic |
| hyperplastic polyp, irritable bowel syndrome (IBS) | lavage fluid |
| versus normal, classifying Dukes stages A, B, C, | |
| and/or D of colon cancer, adenoma with low-grade | |
| hyperplasia versus high-grade hyperplasia, | |
| adenoma versus normal, colorectal cancer versus | |
| normal, IBS versus. ulcerative colitis (UC) versus | |
| Crohn's disease (CD), | |
| Pregnancy related physiological states, conditions, | Maternal serum, plasma, amniotic fluid, cord blood |
| or affiliated diseases: genetic risk, adverse | |
| pregnancy outcomes | |

[0180] The methods of the invention can be used to characterize a phenotype using a blood sample or blood derivative. Blood derivatives include plasma and serum. Blood plasma is the liquid component of whole blood, and makes up approximately 55% of the total blood volume. It is composed primarily of water with small amounts of minerals, salts, ions, nutrients, and proteins in solution. In whole blood, red blood cells, leukocytes, and platelets are suspended within the plasma. Blood serum refers to blood plasma without fibrinogen or other clotting factors (i.e., whole blood minus both the cells and the clotting factors).

[0181] The biological sample may be obtained through a third party, such as a party not performing the analysis of the biomarkers, whether direct assessment of a biological sample or by profiling one or more vesicles obtained from the biological sample. For example, the sample may be obtained through a clinician, physician, or other health care manager of a subject from which the sample is derived. Alternatively, the biological sample may obtained by the same party analyzing the vesicle. In addition, biological samples be assayed, are archived (e.g., frozen) or otherwise stored in under preservative conditions.

[0182] Furthermore, a biological sample can comprise a vesicle or cell membrane fragment that is derived from a cell of origin and available extracellularly in a subject's biological fluid or extracellular milieu.

[0183] Methods of the invention can include assessing one or more vesicles, including assessing vesicle populations. A vesicle, as used herein, is a membrane vesicle that is shed from cells. Vesicles or membrane vesicles include without limitation: circulating microvesicles (cMVs), microvesicle, exosome, nanovesicle, dexosome, bleb, blebby, prostasome, microparticle, intralumenal vesicle, membrane fragment, intralumenal endosomal vesicle, endosomal-like vesicle, exocytosis vehicle, endosome vesicle, endosomal vesicle, apoptotic body, multivesicular body, secretory vesicle, phospholipid vesicle, liposomal vesicle, argosome, texasome, secresome, tolerosome, melanosome, oncosome, or exocytosed vehicle. Furthermore, although vesicles may be produced by different cellular processes, the methods of the invention are not limited to or reliant on any one mechanism, insofar as such vesicles are present in a biological sample and are capable of being characterized by the methods disclosed herein. Unless otherwise specified, methods that make use of a species of vesicle can be applied to other types of vesicles. Vesicles comprise spherical structures with a lipid bilayer similar to cell membranes which surrounds an inner compartment which can contain soluble components, sometimes referred to as the payload. In some embodiments, the methods of the invention make use of exosomes, which are small secreted vesicles of about 40-100 nm in diameter. For a review of membrane vesicles, including types and characterizations, see Thery et al., Nat Rev Immunol. 2009 August; 9(8):581-93. Some properties of different types of vesicles include those in Table 2:

TABLE 2
Vesicle Properties

| | | | | Membrane | Exosome- | Apoptotic |
|---|---|---|---|---|---|---|
| Feature | Exosomes | Microvesicles | Ectosomes | particles | like vesicles | vesicles |
| Size | 50-100 nm | 100-1,000 nm | 50-200 nm | 50-80 nm | 20-50 nm | 50-500 nm |
| Density in | 1.13-1.19 g/ml | | | 1.04-1.07 g/ml | 1.1 g/ml | 1.16-1.28 g/ml |
| sucrose | | | | | | |
| EM | Cup shape | Irregular | Bilamellar | Round | Irregular | Heterogeneous |
| appearance | | shape, | round | | shape | |
| | | electron | structures | | | |
| | | dense | | | | |
| Sedimentation | 100,000 g | 10,000 g | 160,000- | 100,000- | 175,000 g | 1,200 g, 10,000 |
| | | | 200,000 g | 200,000 g | | g, 100,000 g |
| Lipid | Enriched in | Expose PPS | Enriched in | | No lipid | |
| composition | cholesterol, | | cholesterol and | | rafts | |
| | sphingomyelin | | diacylglycerol; | | | |
| | and ceramide; | | expose PPS | | | |
| | contains lipid | | | | | |
| | rafts; expose | | | | | |
| | PPS | | | | | |
| Major protein | Tetraspanins | Integrins, | CR1 and | CD133; no | TNFRI | Histones |
| markers | (e.g., CD63, | selectins and | proteolytic | CD63 | | |
| | CD9), Alix, | CD40 ligand | enzymes; no | | | |
| | TSG101 | | CD63 | | | |
| Intracellular | Internal | Plasma | Plasma | Plasma | | |
| origin | compartments | membrane | membrane | membrane | | |
| | (endosomes) | | | | | |

Abbreviations: phosphatidylserine (PPS); electron microscopy (EM)

[0184] Vesicles include shed membrane bound particles, or “microparticles,” that are derived from either the plasma membrane or an internal membrane. Vesicles can be released into the extracellular environment from cells. Cells releasing vesicles include without limitation cells that originate from, or are derived from, the ectoderm, endoderm, or mesoderm. The cells may have undergone genetic, environmental, and/or any other variations or alterations. For example, the cell can be tumor cells. A vesicle can reflect any changes in the source cell, and thereby reflect changes in the originating cells, e.g., cells having various genetic mutations. In one mechanism, a vesicle is generated intracellularly when a segment of the cell membrane spontaneously invaginates and is ultimately exocytosed (see for example, Keller et al., Immunol. Lett. 107 (2): 1028 (2006)). Vesicles also include cell-derived structures bounded by a lipid bilayer membrane arising from both herniated evagination (blebbing) separation and sealing of portions of the plasma membrane or from the export of any intracellular membrane-bounded vesicular structure containing various membrane-associated proteins of tumor origin, including surface-bound molecules derived from the host circulation that bind selectively to the tumor-derived proteins together with molecules contained in the vesicle lumen, including but not limited to tumor-derived microRNAs or intracellular proteins. Blebs and blebbing are further described in Charras et al., Nature Reviews Molecular and Cell Biology, Vol. 9, No. 11, p. 730-736 (2008). A vesicle shed into circulation or bodily fluids from tumor cells may be referred to as a “circulating tumor-derived vesicle.” When such vesicle is an exosome, it may be referred to as a circulating-tumor derived exosome (CTE). In some instances, a vesicle can be derived from a specific cell of origin. CTE, as with a cell-of-origin specific vesicle, typically have one or more unique biomarkers that permit isolation of the CTE or cell-of-origin specific vesicle, e.g., from a bodily fluid and sometimes in a specific manner. For example, a cell or tissue specific markers are used to identify the cell of origin. Examples of such cell or tissue specific markers are disclosed herein and can further be accessed in the Tissue-specific Gene Expression and Regulation (TiGER) Database, available at bioinfo.wilmer.jhu.edu/tiger/; Liu et al. (2008) TiGER: a database for tissue-specific gene expression and regulation. BMC Bioinformatics. 9:271; TissueDistributionDBs, available at genome.dkfz-heidelberg.de/menu/tissue_db/index.html.

[0185] A vesicle can have a diameter of greater than about 10 nm, 20 nm, or 30 nm. A vesicle can have a diameter of greater than 40 nm, 50 nm, 100 nm, 200 nm, 500 nm, 1000 nm, 1500 nm, 2000 nm or greater than 10,000 nm. A vesicle can have a diameter of about 20-2000 nm, about 20-1500 nm, about 30-1000 nm, about 30-800 nm, about 30-200 nm, or about 30-100 nm. In some embodiments, the vesicle has a diameter of less than 10,000 nm, 2000 nm, 1500 nm, 1000 nm, 800 nm, 500 nm, 200 nm, 100 nm, 50 nm, 40 nm, 30 nm, 20 nm or less than 10 nm. As used herein the term “about” in reference to a numerical value means that variations of 10% above or below the numerical value are within the range ascribed to the specified value. Typical sizes for various types of vesicles are shown in Table 2. Vesicles can be assessed to measure the diameter of a single vesicle or any number of vesicles. For example, the range of diameters of a vesicle population or an average diameter of a vesicle population can be determined. Vesicle diameter can be assessed using methods known in the art, e.g., imaging technologies such as electron microscopy. In an embodiment, a diameter of one or more vesicles is determined using optical particle detection. See, e.g., U.S. Pat. No. 7,751,053, entitled “Optical Detection and Analysis of Particles” and issued Jul. 6, 2010; and U.S. Pat. No. 7,399,600, entitled “Optical Detection and Analysis of Particles” and issued Jul. 15, 2010.

[0186] In some embodiments, the methods of the invention comprise assessing vesicles directly such as in a biological sample without prior isolation, purification, or concentration from the biological sample. For example, the amount of vesicles in the sample can by itself provide a biosignature that provides a diagnostic, prognostic or theranostic determination. Alternatively, the vesicle in the sample may be isolated, captured, purified, or concentrated from a sample prior to analysis. As noted, isolation, capture or purification as used herein comprises partial isolation, partial capture or partial purification apart from other components in the sample. Vesicle isolation can be performed using various techniques as described herein, e.g., chromatography, filtration, centrifugation, flow cytometry, affinity capture (e.g., to a planar surface or bead), and/or using microfluidics. FIGS. 19B-C present an overview of a method of the invention for assessing microvesicles using an aptamer pool.

[0187] Vesicles such as exosomes can be assessed to provide a phenotypic characterization by comparing vesicle characteristics to a reference. In some embodiments, surface antigens on a vesicle are assessed. The surface antigens can provide an indication of the anatomical origin and/or cellular of the vesicles and other phenotypic information, e.g., tumor status. For example, wherein vesicles found in a patient sample, e.g., a bodily fluid such as blood, serum or plasma, are assessed for surface antigens indicative of colorectal origin and the presence of cancer. The surface antigens may comprise any informative biological entity that can be detected on the vesicle membrane surface, including without limitation surface proteins, lipids, carbohydrates, and other membrane components. For example, positive detection of colon derived vesicles expressing tumor antigens can indicate that the patient has colorectal cancer. As such, methods of the invention can be used to characterize any disease or condition associated with an anatomical or cellular origin, by assessing, for example, disease-specific and cell-specific biomarkers of one or more vesicles obtained from a subject.

[0188] In another embodiment, the methods of the invention comprise assessing one or more vesicle payload to provide a phenotypic characterization. The payload with a vesicle comprises any informative biological entity that can be detected as encapsulated within the vesicle, including without limitation proteins and nucleic acids, e.g., genomic or cDNA, mRNA, or functional fragments thereof, as well as microRNAs (miRs). In addition, methods of the invention are directed to detecting vesicle surface antigens (in addition or exclusive to vesicle payload) to provide a phenotypic characterization. For example, vesicles can be characterized by using binding agents (e.g., antibodies or aptamers) that are specific to vesicle surface antigens, and the bound vesicles can be further assessed to identify one or more payload components disclosed therein. As described herein, the levels of vesicles with surface antigens of interest or with payload of interest can be compared to a reference to characterize a phenotype. For example, overexpression in a sample of cancer-related surface antigens or vesicle payload, e.g., a tumor associated mRNA or microRNA, as compared to a reference, can indicate the presence of cancer in the sample. The biomarkers assessed can be present or absent, increased or reduced based on the selection of the desired target sample and comparison of the target sample to the desired reference sample. Non-limiting examples of target samples include: disease; treated/not-treated; different time points, such as a in a longitudinal study; and non-limiting examples of reference sample: non-disease; normal; different time points; and sensitive or resistant to candidate treatment(s).

### Microvesicle Isolation and Analysis

[0189] Sample Processing

[0190] A vesicle or a population of vesicles may be isolated, purified, concentrated or otherwise enriched prior to and/or during analysis. Unless otherwise specified, the terms “purified,” “isolated,” or similar as used herein in reference to vesicles or biomarker components are intended to include partial or complete purification or isolation of such components from a cell or organism. Analysis of a vesicle can include quantitiating the amount one or more vesicle populations of a biological sample. For example, a heterogeneous population of vesicles can be quantitated, or a homogeneous population of vesicles, such as a population of vesicles with a particular biomarker profile, a particular biosignature, or derived from a particular cell type can be isolated from a heterogeneous population of vesicles and quantitated. Analysis of a vesicle can also include detecting, quantitatively or qualitatively, one or more particular biomarker profile or biosignature of a vesicle, as described herein.

[0191] A vesicle can be stored and archived, such as in a bio-fluid bank and retrieved for analysis as desired. A vesicle may also be isolated from a biological sample that has been previously harvested and stored from a living or deceased subject. In addition, a vesicle may be isolated from a biological sample which has been collected as described in King et al., Breast Cancer Res 7(5): 198-204 (2005). A vesicle can be isolated from an archived or stored sample. Alternatively, a vesicle may be isolated from a biological sample and analyzed without storing or archiving of the sample. Furthermore, a third party may obtain or store the biological sample, or obtain or store the vesicle for analysis.

[0192] An enriched population of vesicles can be obtained from a biological sample. For example, vesicles may be concentrated or isolated from a biological sample using size exclusion chromatography, density gradient centrifugation, differential centrifugation, nanomembrane ultrafiltration, immunoabsorbent capture, affinity purification, microfluidic separation, or combinations thereof.

[0193] Size exclusion chromatography, such as gel permeation columns, centrifugation or density gradient centrifugation, and filtration methods can be used. For example, a vesicle can be isolated by differential centrifugation, anion exchange and/or gel permeation chromatography (for example, as described in U.S. Pat. Nos. 6,899,863 and 6,812,023), sucrose density gradients, organelle electrophoresis (for example, as described in U.S. Pat. No. 7,198,923), magnetic activated cell sorting (MACS), or with a nanomembrane ultrafiltration concentrator. Various combinations of isolation or concentration methods can be used.

[0194] Highly abundant proteins, such as albumin and immunoglobulin in blood samples, may hinder isolation of vesicles from a biological sample. For example, a vesicle can be isolated from a biological sample using a system that uses multiple antibodies that are specific to the most abundant proteins found in a biological sample, such as blood. Such a system can remove up to several proteins at once, thus unveiling the lower abundance species such as cell-of-origin specific vesicles. This type of system can be used for isolation of vesicles from biological samples such as blood, cerebrospinal fluid or urine. The isolation of vesicles from a biological sample may also be enhanced by high abundant protein removal methods as described in Chromy et al. J Proteome Res 2004; 3:1120-1127. In another embodiment, the isolation of vesicles from a biological sample may also be enhanced by removing serum proteins using glycopeptide capture as described in Zhang et al, Mol Cell Proteomics 2005; 4:144-155. In addition, vesicles from a biological sample such as urine may be isolated by differential centrifugation followed by contact with antibodies directed to cytoplasmic or anti-cytoplasmic epitopes as described in Pisitkun et al., Proc Natl Acad Sci USA, 2004; 101:13368-13373.

[0195] Plasma contains a large variety of proteins including albumin, immunoglobulins, and clotting proteins such as fibrinogen. About 60% of plasma protein comprises the protein albumin (e.g., human serum albumin or HSA), which contributes to osmotic pressure of plasma to assist in the transport of lipids and steroid hormones. Globulins make up about 35% of plasma proteins and are used in the transport of ions, hormones and lipids assisting in immune function. About 4% of plasma protein comprises fibrinogen which is essential in the clotting of blood and can be converted into the insoluble protein fibrin. Other types of blood proteins include: Prealbumin, Alpha 1 antitrypsin, Alpha 1 acid glycoprotein, Alpha 1 fetoprotein, Haptoglobin, Alpha 2 macroglobulin, Ceruloplasmin, Transferrin, complement proteins C3 and C4, Beta 2 microglobulin, Beta lipoprotein, Gamma globulin proteins, C-reactive protein (CRP), Lipoproteins (chylomicrons, VLDL, LDL, HDL), other globulins (types alpha, beta and gamma), Prothrombin and Mannose-binding lectin (MBL). Any of these proteins, including classes of proteins, or derivatives thereof (such as fibrin which is derived from the cleavage of fibrinogen) can be selectively depleted from a biological sample prior to further analysis performed on the sample. Without being bound by theory, removal of such background proteins may facilitate more sensitive, accurate, or precise detection of the biomarkers of interest in the sample.

[0196] Abundant proteins in blood or blood derivatives (e.g., plasma or serum) include without limitation albumin, IgG, transferrin, fibrinogen, IgA, α₂-Macroglobulin, IgM, α₁-Antitrypsin, complement C3, haptoglobulin, apolipoprotein A1, apolipoprotein A3, apolipoprotein B, α₁-Acid Glycoprotein, ceruloplasmin, complement C4, Clq, IgD, prealbumin (transthyretin), and plasminogen. Such proteins can be depleted using commercially available columns and kits. Examples of such columns comprise the Multiple Affinity Removal System from Agilent Technologies (Santa Clara, Calif.). This system include various cartridges designed to deplete different protein profiles, including the following cartridges with performance characteristics according to the manufacturer: Human 14, which eliminates approximately 94% of total protein (albumin, IgG, antitrypsin, IgA, transferrin, haptoglobin, fibrinogen, alpha2-macroglobulin, alpha1-acid glycoprotein (orosomucoid), IgM, apolipoprotein A1, apolipoprotein All, complement C3 and transthyretin); Human 7, which eliminates approximately 85-90% of total protein (albumin, IgG, IgA, transferrin, haptoglobin, antitrypsin, and fibrinogen); Human 6, which eliminates approximately 85-90% of total protein (albumin, IgG, IgA, transferrin, haptoglobin, and antitrypsin); Human Albumin/IgG, which eliminates approximately 69% of total protein (albumin and IgG); and Human Albumin, which eliminates approximately 50-55% of total protein (albumin). The ProteoPrep® 20 Plasma Immunodepletion Kit from Sigma-Aldrich is intended to specifically remove the 20 most abundant proteins from human plasma or serum, which is about remove 97-98% of the total protein mass in plasma or serum (Sigma-Aldrich, St. Louis, Mo.). According to the manufacturer, the ProteoPrep® 20 removes: albumin, IgG, transferrin, fibrinogen, IgA, α₂-Macroglobulin, IgM, α₁-Antitrypsin, complement C3, haptoglobulin, apolipoprotein A1, A3 and B; α₁-Acid Glycoprotein, ceruloplasmin, complement C4, Clq; IgD, prealbumin, and plasminogen. Sigma-Aldrich also manufactures ProteoPrep® columns to remove albumin (HSA) and immunoglobulins (IgG). The ProteomeLab IgY-12 High Capacity Proteome Partitioning kits from Beckman Coulter (Fullerton, Calif.) are specifically designed to remove twelve highly abundant proteins (Albumin, IgG, Transferrin, Fibrinogen, IgA, α₂-macroglobulin, IgM, α₁-Antitrypsin, Haptoglobin, Orosomucoid, Apolipoprotein A-I, Apolipoprotein A-II) from the human biological fluids such as serum and plasma. Generally, such systems rely on immunodepletion to remove the target proteins, e.g., using small ligands and/or full antibodies. The PureProteome™ Human Albumin/Immunoglobulin Depletion Kit from Millipore (EMD Millipore Corporation, Billerica, Mass., USA) is a magnetic bead based kit that enables high depletion efficiency (typically >99%) of Albumin and all Immunoglobulins (i.e., IgG, IgA, IgM, IgE and IgD) from human serum or plasma samples. The ProteoExtract® Albumin/IgG Removal Kit, also from Millipore, is designed to deplete >80% of albumin and IgG from body fluid samples. Other similar protein depletion products include without limitation the following: Aurum™ Affi-Gels Blue mini kit (Bio-Rad, Hercules, Calif., USA); Vivapure® anti-HSA/IgG kit (Sartorius Stedim Biotech, Goettingen, Germany), Qproteome albumin/IgG depletion kit (Qiagen, Hilden, Germany); Seppro® MIXED12-LC20 column (GenWay Biotech, San Diego, Calif., USA); Abundant Serum Protein Depletion Kit (Norgen Biotek Corp., Ontario, Canada); GBC Human Albumin/IgG/Transferrin 3 in 1 Depletion Column/Kit (Good Biotech Corp., Taiwan). These systems and similar systems can be used to remove abundant proteins from a biological sample, thereby improving the ability to detect low abundance circulating biomarkers such as proteins and vesicles.

[0197] Thromboplastin is a plasma protein aiding blood coagulation through conversion of prothrombin to thrombin. Thrombin in turn acts as a seine protease that converts soluble fibrinogen into insoluble strands of fibrin, as well as catalyzing many other coagulation-related reactions. Thus, thromboplastin is a protein that can be used to facilitate precipitation of fibrinogen/fibrin (blood clotting factors) out of plasma. In addition to or as an alternative to immunoaffinity protein removal, a blood sample can be treated with thromboplastin to deplete fibrinogen/fibrin. Thromboplastin removal can be performed in addition to or as an alternative to immunoaffinity protein removal as described above using methods known in the art. Precipitation of other proteins and/or other sample particulate can also improve detection of circulating biomarkers such as vesicles in a sample. For example, ammonium sulfate treatment as known in the art can be used to precipitate immunoglobulins and other highly abundant proteins.

[0198] In an embodiment, the invention provides a method of detecting a presence or level of one or more circulating biomarker such as a microvesicle in a biological sample, comprising: (a) providing a biological sample comprising or suspected to comprise the one or more circulating biomarker; (b) selectively depleting one or more abundant protein from the biological sample provided in step (a); (c) performing affinity selection of the one or more circulating biomarker from the sample depleted in step (b), thereby detecting the presence or level of one or more circulating biomarker. The biological sample may comprise a bodily fluid, e.g., peripheral blood, sera, plasma, ascites, urine, cerebrospinal fluid (CSF), sputum, saliva, bone marrow, synovial fluid, aqueous humor, amniotic fluid, cerumen, breast milk, broncheoalveolar lavage fluid, semen, prostatic fluid, cowper's fluid or pre-ejaculatory fluid, female ejaculate, sweat, fecal matter, hair, tears, cyst fluid, pleural and peritoneal fluid, pericardial fluid, lymph, chyme, chyle, bile, interstitial fluid, menses, pus, sebum, vomit, vaginal secretions, mucosal secretion, stool water, pancreatic juice, lavage fluids from sinus cavities, bronchopulmonary aspirates, blastocyl cavity fluid, umbilical cord blood, or a derivative of any thereof. In some embodiments, the biological sample comprises peripheral blood, serum or plasma. Illustrative protocols and results from selectively depleting one or more abundant protein from blood plasma prior to vesicle detection can be found in Example 40 of International Patent Publication No. WO/2014/082083, filed Nov. 26, 2013, which patent publication is incorporated by reference herein in its entirety.

[0199] An abundant protein may comprise a protein in the sample that is present in the sample at a high enough concentration to potentially interfere with downstream processing or analysis. Typically, an abundant protein is not the target of any further analysis of the sample. The abundant protein may constitute at least 10⁻⁵, 10⁻⁴, 10⁻³, 0.01, 0.02, 0.03, 0.04, 0.05, 0.06, 0.07, 0.08, 0.09, 0.1, 0.2, 0.3, 0.4, 0.5, 0.6, 0.7, 0.8, 0.9, 1, 2, 3, 4, 5, 6, 7, 8, 9, 10, 11, 12, 13, 14, 15, 20, 25, 30, 35, 40, 45, 50, 55, 60, 65, 70, 75, 80, 85, 90, 95, 96, 97, 98 or at least 99% of the total protein mass in the sample. In some embodiments, the abundant protein is present at less than 10-5% of the total protein mass in the sample, e.g., in the case of a rare target of interest. As described herein, in the case of blood or a derivative thereof, the one or more abundant protein may comprise one or more of albumin, IgG, transferrin, fibrinogen, fibrin, IgA, α₂-Marcroglobulin, IgM, α₁-Antitrypsin, complement C3, haptoglobulin, apolipoprotein A1, A3 and B; α₁-Acid Glycoprotein, ceruloplasmin, complement C4, Clq, IgD, prealbumin (transthyretin), plasminogen, a derivative of any thereof, and a combination thereof. The one or more abundant protein in blood or a blood derivative may also comprise one or more of Albumin, Immunoglobulins, Fibrinogen, Prealbumin, Alpha 1 antitrypsin, Alpha 1 acid glycoprotein, Alpha 1 fetoprotein, Haptoglobin, Alpha 2 macroglobulin, Ceruloplasmin, Transferrin, complement proteins C3 and C4, Beta 2 microglobulin, Beta lipoprotein, Gamma globulin proteins, C-reactive protein (CRP), Lipoproteins (chylomicrons, VLDL, LDL, HDL), other globulins (types alpha, beta and gamma), Prothrombin, Mannose-binding lectin (MBL), a derivative of any thereof, and a combination thereof.

[0200] In some embodiments, selectively depleting the one or more abundant protein comprises contacting the biological sample with thromboplastin to initiate precipitation of fibrin. The one or more abundant protein may also be depleted by immunoaffinity, precipitation, or a combination thereof. For example, the sample can be treated with thromboplastin to precipitate fibrin, and then the sample may be passed through a column to remove HSA, IgG, and other abundant proteins as desired.

“Selectively depleting” the one or more abundant protein comprises depleting the abundant protein from the sample at a higher percentage than depletion another entity in the sample, such as another protein or microvesicle, including a target of interest for downstream processing or analysis. Selectively depleting the one or more abundant protein may comprise depleting the abundant protein at a 1.1-fold, 1.2-fold, 1.3-fold, 1.4-fold, 1.5-fold, 1.6-fold, 1.7-fold, 1.8-fold, 1.9-fold, 2-fold, 3-fold, 4-fold, 5-fold, 6-fold, 7-fold, 8-fold, 9-fold, 10-fold, 11-fold, 12-fold, 13-fold, 14-fold, 15-fold, 16-fold, 17-fold, 18-fold, 19-fold, 20-fold, 25-fold, 30-fold, 40-fold, 50-fold, 60-fold, 70-fold, 80-fold, 90-fold, 100-fold, 200-fold, 300-fold, 400-fold, 500-fold, 600-fold, 700-fold, 800-fold, 900-fold, 1000-fold, 10⁴-fold, 10⁵-fold, 10⁶-fold, 10⁷-fold, 10⁸-fold, 10⁹-fold, 10¹⁰-fold, 10¹¹-fold, 10¹²-fold, 10¹³-fold, 10¹⁴-fold, 10¹⁵-fold, 10¹⁶-fold, 10¹⁷-fold, 10¹⁸-fold, 10¹⁹-fold, 10²⁰-fold, or higher rate than another entity in the sample, such as another protein or microvesicle, including a target of interest for downstream processing or analysis. In an embodiment, there is little to no observable depletion of the target of interest as compared to the depletion of the abundant protein. In some embodiments, selectively depleting the one or more abundant protein from the biological sample comprises depleting at least 25%, 30%, 35%, 40%, 45%, 50%, 55%, 60%, 65%, 70%, 75%, 80%, 85%, 90%, 91%, 92%, 93%, 94%, 95%, 96%, 97%, 98%, 99% or 100% of the one or more abundant protein.

[0201] Removal of highly abundant proteins and other non-desired entities can further be facilitated with a non-stringent size exclusion step. For example, the sample can be processed using a high molecular weight cutoff size exclusion step to preferentially enrich high molecular weight vesicles apart from lower molecular weight proteins and other entities. In some embodiments, a sample is processed with a column (e.g., a gel filtration column) or filter having a molecular weight cutoff (MWCO) of 500, 600, 700, 800, 900, 1000, 1500, 2000, 2500, 3000, 3500, 4000, 4500, 5000, 5500, 6000, 6500, 7000, 7500, 8000, 8500, 9000, 9500, 10000, or greater than 10000 kiloDaltons (kDa). In an embodiment, a 700 kDa filtration column is used. In such a step, the vesicles will be retained or flow more slowly than the column or filter than the lower molecular weight entities. Such columns and filters are known in the art.

[0202] Isolation or enrichment of a vesicle from a biological sample can also be enhanced by use of sonication (for example, by applying ultrasound), detergents, other membrane-activating agents, or any combination thereof. For example, ultrasonic energy can be applied to a potential tumor site, and without being bound by theory, release of vesicles from a tissue can be increased, allowing an enriched population of vesicles that can be analyzed or assessed from a biological sample using one or more methods disclosed herein.

[0203] With methods of detecting circulating biomarkers as described here, e.g., antibody affinity isolation, the consistency of the results can be optimized as desired using various concentration or isolation procedures. Such steps can include agitation such as shaking or vortexing, different isolation techniques such as polymer based isolation, e.g., with PEG, and concentration to different levels during filtration or other steps. It will be understood by those in the art that such treatments can be applied at various stages of testing the vesicle containing sample. In one embodiment, the sample itself, e.g., a bodily fluid such as plasma or serum, is vortexed. In some embodiments, the sample is vortexed after one or more sample treatment step, e.g., vesicle isolation, has occurred. Agitation can occur at some or all appropriate sample treatment steps as desired. Additives can be introduced at the various steps to improve the process, e.g., to control aggregation or degradation of the biomarkers of interest.

[0204] The results can also be optimized as desireable by treating the sample with various agents. Such agents include additives to control aggregation and/or additives to adjust pH or ionic strength. Additives that control aggregation include blocking agents such as bovine serum albumin (BSA), milk or StabilGuard® (a BSA-free blocking agent; Product code SG02, Surmodics, Eden Prairie, Minn.), chaotropic agents such as guanidium hydro chloride, and detergents or surfactants. Useful ionic detergents include sodium dodecyl sulfate (SDS, sodium lauryl sulfate (SLS)), sodium laureth sulfate (SLS, sodium lauryl ether sulfate (SLES)), ammonium lauryl sulfate (ALS), cetrimonium bromide, cetrimonium chloride, cetrimonium stearate, and the like. Useful non-ionic (zwitterionic) detergents include polyoxyethylene glycols, polysorbate 20 (also known as Tween 20), other polysorbates (e.g., 40, 60, 65, 80, etc), Triton-X (e.g., X100, X114), 3-[(3-cholamidopropyl)dimethylammonio]-1-propanesulfonate (CHAPS), CHAPSO, deoxycholic acid, sodium deoxycholate, NP-40, glycosides, octyl-thio-glucosides, maltosides, and the like. In some embodiments, Pluronic F-68, a surfactant shown to reduce platelet aggregation, is used to treat samples containing vesicles during isolation and/or detection. F68 can be used from a 0.1% to 10% concentration, e.g., a 1%, 2.5% or 5% concentration. The pH and/or ionic strength of the solution can be adjusted with various acids, bases, buffers or salts, including without limitation sodium chloride (NaC), phosphate-buffered saline (PBS), tris-buffered saline (TBS), sodium phosphate, potassium chloride, potassium phosphate, sodium citrate and saline-sodium citrate (SSC) buffer. In some embodiments, NaCl is added at a concentration of 0.1% to 10%, e.g., 1%, 2.5% or 5% final concentration. In some embodiments, Tween 20 is added to 0.005 to 2% concentration, e.g., 0.05%, 0.25% or 0.5% final concentration. Blocking agents for use with the invention comprise inert proteins, e.g., milk proteins, non-fat dry milk protein, albumin, BSA, casein, or serum such as newborn calf serum (NBCS), goat serum, rabbit serum or salmon serum. The proteins can be added at a 0.1% to 10% concentration, e.g., 1%, 2%, 3%, 3.5%, 4%, 5%, 6%, 7%, 8%, 9% or 10% concentration. In some embodiments, BSA is added to 0.1% to 10% concentration, e.g., 1%, 2%, 3%, 3.5%, 4%, 5%, 6%, 7%, 8%, 9% or 10% concentration. In an embodiment, the sample is treated according to the methodology presented in U.S. patent application Ser. No. 11/632,946, filed Jul. 13, 2005, which application is incorporated herein by reference in its entirety. Commercially available blockers may be used, such as SuperBlock, StartingBlock, Protein-Free from Pierce (a division of Thermo Fisher Scientific, Rockford, Ill.). In some embodiments, SSC/detergent (e.g., 20×SSC with 0.5% Tween 20 or 0.1% Triton-X 100) is added to 0.1% to 10% concentration, e.g., at 1.0% or 5.0% concentration.

[0205] The methods of detecting vesicles and other circulating biomarkers can be optimized as desired with various combinations of protocols and treatments as described herein. A detection protocol can be optimized by various combinations of agitation, isolation methods, and additives. In some embodiments, the patient sample is vortexed before and after isolation steps, and the sample is treated with blocking agents including BSA and/or F68. Such treatments may reduce the formation of large aggregates or protein or other biological debris and thus provide a more consistent detection reading.

[0206] Filtration and Ultrafiltration

[0207] A vesicle can be isolated from a biological sample by filtering a biological sample from a subject through a filtration module and collecting from the filtration module a retentate comprising the vesicle, thereby isolating the vesicle from the biological sample. The method can comprise filtering a biological sample from a subject through a filtration module comprising a filter (also referred to herein as a selection membrane); and collecting from the filtration module a retentate comprising the vesicle, thereby isolating the vesicle from the biological sample. For example, in one embodiment, the filter retains molecules greater than about 100 kiloDaltons. In such cases, microvesicles are generally found within the retentate of the filtration process whereas smaller entities such as proteins, protein complexes, nucleic acids, etc, pass through into the filtrate.

[0208] The method can be used when determining a biosignature of one or more microvesicle. The method can also further comprise contacting the retentate from the filtration to a plurality of substrates, wherein each substrate is coupled to one or more capture agents, and each subset of the plurality of substrates comprises a different capture agent or combination of capture agents than another subset of the plurality of substrates.

[0209] Also provided herein is a method of determining a biosignature of a vesicle in a sample comprising: filtering a biological sample from a subject with a disorder through a filtration module, collecting from the filtration module a retentate comprising one or more vesicles, and determining a biosignature of the one or more vesicles. In one embodiment, the filtration module comprises a filter that retains molecules greater than about 100 or 150 kiloDaltons.

[0210] The method disclosed herein can further comprise characterizing a phenotype in a subject by filtering a biological sample from a subject through a filtration module, collecting from the filtration module a retentate comprising one or more vesicles; detecting a biosignature of the one or more vesicles; and characterizing a phenotype in the subject based on the biosignature, wherein characterizing is with at least 70% sensitivity. In some embodiments, characterizing comprises determining an amount of one or more vesicle having the biosignature. Furthermore, the characterizing can be from about 80% to 100% sensitivity.

[0211] Also provided herein is a method for multiplex analysis of a plurality of vesicles. In some embodiments, the method comprises filtering a biological sample from a subject through a filtration module; collecting from the filtration module a retentate comprising the plurality of vesicles, applying the plurality of vesicles to a plurality of capture agents, wherein the plurality of capture agents is coupled to a plurality of substrates, and each subset of the plurality of substrates is differentially labeled from another subset of the plurality of substrates; capturing at least a subset of the plurality of vesicles; and determining a biosignature for at least a subset of the captured vesicles. In one embodiment, each substrate is coupled to one or more capture agents, and each subset of the plurality of substrates comprises a different capture agent or combination of capture agents as compared to another subset of the plurality of substrates. In some embodiments, at least a subset of the plurality of substrates is intrinsically labeled, such as comprising one or more labels. The substrate can be a particle or bead, or any combination thereof. In some embodiments, the filter retains molecules greater than 1, 2, 3, 4, 5, 6, 7, 8, 9, 10, 15, 20, 25, 30, 40, 50, 60, 70, 80, 90, 100, 110, 120, 130, 140, 150, 160, 170, 180, 190, 200, 250, 300, 400, 500, 600, 700, 800, 900, 1000, 1500, 2000, 2500, 3000, 3500, 4000, 4500, 5000, 5500, 6000, 6500, 7000, 7500, 8000, 8500, 9000, 9500, 10000, or greater than 10000 kiloDaltons (kDa). In one embodiment, the filtration module comprises a filter that retains molecules greater than about 100 or 150 kiloDaltons. In one embodiment, the filtration module comprises a filter that retains molecules greater than about 9, 20, 100 or 150 kiloDaltons. In still another embodiment, the filtration module comprises a filter that retains molecules greater than about 7000 kDa.

[0212] In some embodiments, the method for multiplex analysis of a plurality of vesicles comprises filtering a biological sample from a subject through a filtration module, wherein the filtration module comprises a filter that retains molecules greater than about 100 kiloDaltons; collecting from the filtration module a retentate comprising the plurality of vesicles; applying the plurality of vesicles to a plurality of capture agents, wherein the plurality of capture agents is coupled to a microarray; capturing at least a subset of the plurality of vesicles on the microarray; and determining a biosignature for at least a subset of the captured vesicles. In some embodiments, the filter retains molecules greater than 1, 2, 3, 4, 5, 6, 7, 8, 9, 10, 15, 20, 25, 30, 40, 50, 60, 70, 80, 90, 100, 110, 120, 130, 140, 150, 160, 170, 180, 190, 200, 250, 300, 400, 500, 600, 700, 800, 900, 1000, 1500, 2000, 2500, 3000, 3500, 4000, 4500, 5000, 5500, 6000, 6500, 7000, 7500, 8000, 8500, 9000, 9500, 10000, or greater than 10000 kiloDaltons (kDa). In one embodiment, the filtration module comprises a filter that retains molecules greater than about 100 or 150 kiloDaltons. In one embodiment, the filtration module comprises a filter that retains molecules greater than about 9, 20, 100 or 150 kiloDaltons. In still another embodiment, the filtration module comprises a filter that retains molecules greater than about 7000 kDa.

[0213] The biological sample can be clarified prior to isolation by filtration. Clarification comprises selective removal of cellular debris and other undesirable materials. For example, cellular debris and other components that may interfere with detection of the circulating biomarkers can be removed. The clarification can be by low-speed centrifugation, such as at about 5,000×g, 4,000×g, 3,000×g, 2,000×g, 1,000×g, or less. The supernatant, or clarified biological sample, containing the vesicle can then be collected and filtered to isolate the vesicle from the clarified biological sample. In some embodiments, the biological sample is not clarified prior to isolation of a vesicle by filtration.

[0214] In some embodiments, isolation of a vesicle from a sample does not use high-speed centrifugation, such as ultracentrifugation. For example, isolation may not require the use of centrifugal speeds, such as about 100,000×g or more. In some embodiments, isolation of a vesicle from a sample uses speeds of less than 50,000×g, 40,000×g, 30,000×g, 20,000×g, 15,000×g, 12,000×g, or 10,000×g.

[0215] Any number of applicable filter configurations can be used to filter a sample of interest. In some embodiments, the filtration module used to isolate the circulating biomarkers from the biological sample is a fiber-based filtration cartridge. For example, the fiber can be a hollow polymeric fiber, such as a polypropylene hollow fiber. A biological sample can be introduced into the filtration module by pumping the sample fluid, such as a biological fluid as disclosed herein, into the module with a pump device, such as a peristaltic pump. The pump flow rate can vary, such as at about 0.25, 0.5, 1, 1.5, 2, 2.5, 3, 3.5, 4, 4.5, 5, 6, 7, 8, 9, or 10 mL/minute. The flow rate can be adjusted given the configuration, e.g., size and throughput, of the filtration module.

[0216] The filtration module can be a membrane filtration module. For example, the membrane filtration module can comprise a filter disc membrane, such as a hydrophilic polyvinylidene difluoride (PVDF) filter disc membrane housed in a stirred cell apparatus (e.g., comprising a magnetic stirrer). In some embodiments, the sample moves through the filter as a result of a pressure gradient established on either side of the filter membrane.

[0217] The filter can comprise a material having low hydrophobic absorptivity and/or high hydrophilic properties. For example, the filter can have an average pore size for vesicle retention and permeation of most proteins as well as a surface that is hydrophilic, thereby limiting protein adsorption. For example, the filter can comprise a material selected from the group consisting of polypropylene, PVDF, polyethylene, polyfluoroethylene, cellulose, secondary cellulose acetate, polyvinylalcohol, and ethylenevinyl alcohol (EVAL®, Kuraray Co., Okayama, Japan). Additional materials that can be used in a filter include, but are not limited to, polysulfone and polyethersulfone.

[0218] The filtration module can have a filter that retains molecules greater than about 1, 2, 3, 4, 5, 6, 7, 8, 9, 10, 15, 20, 25, 30, 40, 50, 60, 70, 80, 90, 100, 110, 120, 130, 140, 150, 160, 170, 180, 190, 200, 250, 300, 400, 500, 600, 700, 800, or 900 kiloDaltons (kDa), such as a filter that has a MWCO (molecular weight cut off) of about 1, 2, 3, 4, 5, 6, 7, 8, 9, 10, 15, 20, 25, 30, 40, 50, 60, 70, 80, 90, 100, 110, 120, 130, 140, 150, 160, 170, 180, 190, 200, 250, 300, 400, 500, 600, 700, 800, or 900 kDa, respectively. In embodiments, the filtration module has a MWCO of 1000 kDa, 1500 kDa, 2000 kDa, 2500 kDa, 3000 kDa, 3500 kDa, 4000 kDa, 4500 kDa, 5000 kDa, 5500 kDa, 6000 kDa, 6500 kDa, 7000 kDa, 7500 kDa, 8000 kDa, 8500 kDa, 9000 kDa, 9500 kDa, 10000 kDa, or greater than 10000 kDa. Ultrafiltration membranes with a range of MWCO of 9 kDa, 20 kDa and/or 150 kDa can be used. In some embodiments, the filter within the filtration module has an average pore diameter of about 0.01 μm to about 0.15 μm, and in some embodiments from about 0.05 μm to about 0.12 μm. In some embodiments, the filter has an average pore diameter of about 0.06 μm, 0.07 μm, 0.08 μm, 0.09 μm, 0.1 μm, 0.11 μm or 0.2 μm.

[0219] The filtration module can be a commerically available column, such as a column typically used for concentrating proteins or for isolating proteins (e.g., ultrafiltration). Examples include, but are not limited to, columns from Millipore (Billerica, Mass.), such as Amicon® centrifugal filters, or from Pierce® (Rockford, Ill.), such as Pierce Concentrator filter devices. Useful columns from Pierce include disposable ultrafiltration centrifugal devices with a MWCO of 9 kDa, 20 kDa and/or 150 kDa. These concentrators consist of a high-performance regenerated cellulose membrane welded to a conical device. The filters can be as described in U.S. Pat. No. 6,269,957 or 6,357,601, both of which applications are incorporated by reference in their entirety herein.

[0220] The retentate comprising the isolated vesicle can be collected from the filtration module. The retentate can be collected by flushing the retentate from the filter. Selection of a filter composition having hydrophilic surface properties, thereby limiting protein adsorption, can be used, without being bound by theory, for easier collection of the retentate and minimize use of harsh or time-consuming collection techniques.

[0221] The collected retentate can then be used subsequent analysis, such as assessing a biosignature of one or more vesicles in the retentate, as further described herein. The analysis can be directly performed on the collected retentate. Alternatively, the collected retentate can be further concentrated or purified, prior to analysis of one or more vesicles. For example, the retentate can be further concentrated or vesicles further isolated from the retentate using size exclusion chromatography, density gradient centrifugation, differential centrifugation, immunoabsorbent capture, affinity purification, microfluidic separation, or combinations thereof, such as described herein. In some embodiments, the retentate can undergo another step of filtration. Alternatively, prior to isolation of a vesicle using a filter, the vesicle is concentrated or isolated using techniques including without limitation size exclusion chromatography, density gradient centrifugation, differential centrifugation, immunoabsorbent capture, affinity purification, microfluidic separation, or combinations thereof.

[0222] Combinations of filters can be used for concentrating and isolating biomarkers. For example, the biological sample may first be filtered through a filter having a porosity or pore size of between about 0.01 μm to about 10 μm, e.g., 0.01 μm to about 2 μm or about 0.05 μm to about 1.5 μm, and then the sample is filtered. For example, prior to filtering a biological sample through a filtration module with a filter that retains molecules greater than about 1, 2, 3, 4, 5, 6, 7, 8, 9, 10, 15, 20, 25, 30, 40, 50, 60, 70, 80, 90, 100, 110, 120, 130, 140, 150, 160, 170, 180, 190, 200, 250, 300, 400, 500, 600, 700, 800, 900, 1000, 1500, 2000, 2500, 3000, 3500, 4000, 4500, 5000, 5500, 6000, 6500, 7000, 7500, 8000, 8500, 9000, 9500, 10000, or greater than 10000 kiloDaltons (kDa), such as a filter that has a MWCO (molecular weight cut off) of about 1, 2, 3, 4, 5, 6, 7, 8, 9, 10, 15, 20, 25, 30, 40, 50, 60, 70, 80, 90, 100, 110, 120, 130, 140, 150, 160, 170, 180, 190, 200, 250, 300, 400, 500, 600, 700, 800, 900, 1000, 1500, 2000, 2500, 3000, 3500, 4000, 4500, 5000, 5500, 6000, 6500, 7000, 7500, 8000, 8500, 9000, 9500, 10000, or greater than 10000 kDa, respectively, the biological sample may first be filtered through a filter having a porosity or pore size of between about 0.01 μm to about 10 μm, e.g., 0.01 μm to about 2 μm or about 0.05 μm to about 1.5 μm. In some embodiments, the filter has a pore size of about 0.01, 0.02, 0.03, 0.04, 0.05, 0.06, 0.07, 0.08, 0.09, 0.1, 0.2, 0.3, 0.4, 0.5, 0.6, 0.7, 0.8, 0.9, 1.0, 1.1, 1.2, 1.3, 1.4, 1.5, 1.6, 1.7, 1.8, 1.9 or 2.0, 3.0, 4.0, 5.0, 6.0, 7.0, 8.0, 9.0 or 10.0 μm. The filter may be a syringe filter. Thus, in one embodiment, the method comprises filtering the biological sample through a filter, such as a syringe filter, wherein the syringe filter has a porosity of greater than about 1 μm, prior to filtering the sample through a filtration module comprising a filter that retains molecules greater than about 100 or 150 kiloDaltons. In an embodiment, the filter is 1.2 M filter and the filtration is followed by passage of the sample through a 7 ml or 20 ml concentrator column with a 150 kDa cutoff Multiple concentrator columns may be used, e.g., in series. For example, a 7000 MWCO filtration unit can be used before a 150 MWCO unit.

[0223] The filtration module can be a component of a microfluidic device. Microfluidic devices, which may also be referred to as “lab-on-a-chip” systems, biomedical micro-electro-mechanical systems (bioMEMs), or multicomponent integrated systems, can be used for isolating, and analyzing, vesicles. Such systems miniaturize and compartmentalize processes that allow for binding of vesicles, detection of biomarkers, and other processes, such as further described herein.

[0224] The filtration module and assessment can be as described in Grant, R., et al., A filtration-based protocol to isolate human Plasma Membrane-derived Vesicles and exosomes from blood plasma, J Immunol Methods (2011) 371:143-51 (Epub 2011 Jun. 30), which reference is incorporated herein by reference in its entirety.

[0225] A microfluidic device can also be used for isolation of a vesicle by comprising a filtration module. For example, a microfluidic device can use one more channels for isolating a vesicle from a biological sample based on size from a biological sample. A biological sample can be introduced into one or more microfluidic channels, which selectively allows the passage of vesicles. The microfluidic device can further comprise binding agents, or more than one filtration module to select vesicles based on a property of the vesicles, for example, size, shape, deformability, biomarker profile, or biosignature.

[0226] The retentate from a filtration step can be further processed before assessment of microvesicles or other biomarkers therein. In an embodiment, the retentate is diluted prior to biomarker assessment, e.g., with an appropriate diluent such as a biologically compatible buffer. In some cases, the retentate is serially diluted. In an aspect, the invention provides a method for detecting a microvesicle population from a biological sample comprising: a) concentrating the biological sample using a selection membrane having a pore size of from 0.01 μm to about 10 μm, or a molecular weight cut off (MWCO) from about 1 kDa to 10000 kDa; b) diluting a retentate from the concentration step into one or more aliquots; and c) contacting each of the one or more aliquots of retentate with one or more binding agent specific to a molecule of at least one microvesicle in the microvesicle population. In a related aspect, the invention provides a method for detecting a microvesicle population from a biological sample comprising: a) concentrating the biological sample using a selection membrane having a pore size of from 0.01 μm to about 10 μm, or a molecular weight cut off (MWCO) from about 1 kDa to 10000 kDa; and b) contacting one or more aliquots of the retentate from the concentrating step with one or more binding agent specific to a molecule of at least one microvesicle in the microvesicle population.

[0227] The selection membrane can be sized to retain the desired biomarkers in the retentate or to allow the desired biomarkers to pass through the filter into the filtrate. The filter membrane can be chosen to have a certain pore size or MWCO value. The selection membrane can have a pore size of about 0.01, 0.02, 0.03, 0.04, 0.05, 0.06, 0.07, 0.08, 0.09, 0.1, 0.2, 0.3, 0.4, 0.5, 0.6, 0.7, 0.8, 0.9, 1.0, 1.1, 1.2, 1.3, 1.4, 1.5, 1.6, 1.7, 1.8, 1.9 or 2.0, 3.0, 4.0, 5.0, 6.0, 7.0, 8.0, 9.0 or 10.0 μm. The selection membrane can also have a MWCO of about 1, 2, 3, 4, 5, 6, 7, 8, 9, 10, 15, 20, 25, 30, 40, 50, 60, 70, 80, 90, 100, 110, 120, 130, 140, 150, 160, 170, 180, 190, 200, 250, 300, 400, 500, 600, 700, 800, 900, 1000, 2000, 3000, 4000, 5000, 6000, 7000, 8000, 9000 or 10000 kDa.

[0228] The retentate can be separated and/or diluted into any number of desired aliquots. For example, multiple aliquots without any dilution or the same dilution can be used to determine reproducibility. In another example, multiple aliquots at different dilutions can be used to construct a concentration curve. In an embodiment, the retentate is separated and/or diluted into at least 1, 2, 3, 4, 5, 6, 7, 8, 9, 10, 11, 12, 13, 14, 15, 16, 17, 18, 19, 20, 25, 30, 35, 40, 45, 50, 55, 60, 65, 70, 75, 80, 85, 90, 95, 100, 150, 200, 250, 300, 350 or 400 aliquots. The aliquots can be at a same dilution or at different dilutions.

[0229] A dilution factor is the ratio of the final volume of a mixture (the mixture of the diluents and aliquot) divided by the initial volume of the aliquot. The retentate can be diluted into one or more aliquots at a dilution factor of about 0, 1, 2, 3, 4, 5, 6, 7, 8, 9, 10, 15, 20, 25, 30, 40, 50, 60, 70, 80, 90, 100, 110, 120, 130, 140, 150, 160, 170, 180, 190, 200, 250, 300, 400, 500, 600, 700, 800, 900, 1000, 1500, 2000, 2500, 3000, 3500, 4000, 4500, 5000, 5500, 6000, 6500, 7000, 7500, 8000, 8500, 9000, 9500, 10000, 20000, 30000, 40000, 50000, 60000, 70000, 80000, 90000 and/or 100000. For example, the retentate can be diluted into one or more aliquot at a dilution factor of about 500.

[0230] To estimate a concentration or form a curve, the retentate can be diluted into multiple aliquots. In an embodiment of the method, the retentate is diluted into one or more aliquots at a dilution factor of about 100, 250, 500, 1000, 10000 and 100000. As desired, the method can further comprise detecting an amount of microvesicles in each aliquot of retentate, e.g., that formed a complex with the one or more binding agent. The curve can be used to determine a linear range of the amount of microvesicles in each aliquot detected versus dilution factor. A concentration of the detected microvesicles for the biological sample can be determined using the amount of microvesicles determined in one or more aliquot within the linear range. The concentration can be compared to a reference concentration, e.g., in order to characterize a phenotype as described herein.

[0231] The invention also provides a related method comprising filtering a biological sample from a subject through a filtration module and collecting a filtrate comprising the vesicle, thereby isolating the vesicle from the biological sample. In such cases cells and other large entities can be retained in the retentate while microvesicles pass through into the filtrate. It will be appreciated that strategies to retain and filter microvesicles can be used in concert. For example, a sample can be filtered with a selection membrane that allows microvesicles to pass through, thereby isolating the microvesicles from large particles (cells, complexes, etc). The filtrate comprising the microvesicle can then be filtered using a selection membrane that retains microvesicles, thereby isolating the microvesicles from smaller particles (proteins, nucleic acids, etc). The isolated microvesicles can be further assessed according to the methods of the invention, e.g., to characterize a phenotype.

[0232] Precipitation

[0233] Vesicles can be isolated using a polymeric precipitation method. The method can be in combination with or in place of the other isolation methods described herein. In one embodiment, the sample containing the vesicles is contacted with a formulation of polyethylene glycol (PEG). The polymeric formulation is incubated with the vesicle containing sample then precipitated by centrifugation. The PEG can bind to the vesicles and can be treated to specifically capture vesicles by addition of a capture moiety, e.g., a pegylated-binding protein such as an antibody. One of skill will appreciate that other polymers in addition to PEG can be used, e.g., PEG derivatives including methoxypolyethylene glycols, poly (ethylene oxide), and various polymers of formula HO—CH₂—(CH₂—CH₂-)n-CH₂—OH having different molecular weights. The efficiency of isolation may depend on various factors including the length of the polymer chains and concentration of polymer used. In preferred embodiments, PEG4000 or PEG 8000 may be used at a concentration of 1%, 2%, 3%, 4%, 5%, 6%, 7%, 8%, 9%, or 10%, e.g., 4% or 8%.

[0234] In some embodiments of the invention, the vesicles are concentrated from a sample using the polymer precipitation method and the isolated vesicles are further separated using another approach. The second step can be used to identify a subpopulation of vesicles, e.g., that display certain biomarkers. The second separation step can comprise size exclusion, a binding agent, an antibody capture step, microbeads, as described herein.

[0235] In an embodiment, vesicles are isolated according to the ExoQuick™ and ExoQuick-TC™ kits from System Biosciences, Mountain View, Calif. USA. These kits use a polymer-based precipitation method to pellet vesicles. Similarly, the vesicles can be isolated using the Total Exosome Isolation (from Serum) or Total Exosome Isolation (from Cell Culture Media) kits from Invitrogen/Life Technologies (Carlsbad, Calif. USA). The Total Exosome Isolation reagent forces less-soluble components such as vesicles out of solution, allowing them to be collected by a short, low-speed centrifugation. The reagent is added to the biological sample, and the solution is incubated overnight at 2° C. to 8° C. The precipitated vesicles are recovered by standard centrifugation.

[0236] Binding Agents

[0237] Binding agents (also referred to as binding reagents) include agents that are capable of binding a target biomarker. A binding agent can be specific for the target biomarker, meaning the agent is capable of binding a target biomarker. The target can be any useful biomarker disclosed herein, such as a biomarker on the vesicle surface. In some embodiments, the target is a single molecule, such as a single protein, so that the binding agent is specific to the single protein. In other embodiments, the target can be a group of molecules, such as a family or proteins having a similar epitope or moiety, so that the binding agent is specific to the family or group of proteins. The group of molecules can also be a class of molecules, such as protein, DNA or RNA. The binding agent can be a capture agent used to capture a vesicle by binding a component or biomarker of a vesicle. In some embodiments, a capture agent comprises an antibody or fragment thereof, or an aptamer, that binds to an antigen on a vesicle. The capture agent can be optionally coupled to a substrate and used to isolate a vesicle, as further described herein.

[0238] A binding agent is an agent that binds to a circulating biomarker, such as a vesicle or a component of a vesicle. The binding agent can be used as a capture agent and/or a detection agent. A capture agent can bind and capture a circulating biomarker, such as by binding a component or biomarker of a vesicle. For example, the capture agent can be a capture antibody or capture antigen that binds to an antigen on a vesicle. A detection agent can bind to a circulating biomarker thereby facilitating detection of the biomarker. For example, a capture agent comprising an antibody or aptamer that is sequestered to a substrate can be used to capture a vesicle in a sample, and a detection agent comprising an antibody or aptamer that carries a label can be used to detect the captured vesicle via detection of the detection agent's label. In some embodiments, a vesicle is assessed using capture and detection agents that recognize the same vesicle biomarkers. For example, a vesicle population can be captured using a tetraspanin such as by using an anti-CD9 antibody bound to a substrate, and the captured vesicles can be detected using a fluorescently labeled anti-CD9 antibody to label the captured vesicles. In other embodiments, a vesicle is assessed using capture and detection agents that recognize different vesicle biomarkers. For example, a vesicle population can be captured using a cell-specific marker such as by using an anti-PCSA antibody bound to a substrate, and the captured vesicles can be detected using a fluorescently labeled anti-CD9 antibody to label the captured vesicles. Similarly, the vesicle population can be captured using a general vesicle marker such as by using an anti-CD9 antibody bound to a substrate, and the captured vesicles can be detected using a fluorescently labeled antibody to a cell-specific or disease specific marker to label the captured vesicles.

[0239] The biomarkers recognized by the binding agent are sometimes referred to herein as an antigen. Unless otherwise specified, antigen as used herein is meant to encompass any entity that is capable of being bound by a binding agent, regardless of the type of binding agent or the immunogenicity of the biomarker. The antigen further encompasses a functional fragment thereof. For example, an antigen can encompass a protein biomarker capable of being bound by a binding agent, including a fragment of the protein that is capable of being bound by a binding agent.

[0240] In one embodiment, a vesicle is captured using a capture agent that binds to a biomarker on a vesicle. The capture agent can be coupled to a substrate and used to isolate a vesicle, as further described herein. In one embodiment, a capture agent is used for affinity capture or isolation of a vesicle present in a substance or sample.

[0241] A binding agent can be used after a vesicle is concentrated or isolated from a biological sample. For example, a vesicle can first be isolated from a biological sample before a vesicle with a specific biosignature is isolated or detected. The vesicle with a specific biosignature can be isolated or detected using a binding agent for the biomarker. A vesicle with the specific biomarker can be isolated or detected from a heterogeneous population of vesicles. Alternatively, a binding agent may be used on a biological sample comprising vesicles without a prior isolation or concentration step. For example, a binding agent is used to isolate or detect a vesicle with a specific biosignature directly from a biological sample.

[0242] A binding agent can be a nucleic acid, protein, or other molecule that can bind to a component of a vesicle. The binding agent can comprise DNA, RNA, monoclonal antibodies, polyclonal antibodies, Fabs, Fab′, single chain antibodies, synthetic antibodies, aptamers (DNA/RNA), peptoids, zDNA, peptide nucleic acids (PNAs), locked nucleic acids (LNAs), lectins, synthetic or naturally occurring chemical compounds (including but not limited to drugs, labeling reagents), dendrimers, or a combination thereof. For example, the binding agent can be a capture antibody. In embodiments of the invention, the binding agent comprises a membrane protein labeling agent. See, e.g., the membrane protein labeling agents disclosed in Alroy et al., US. Patent Publication US 2005/0158708. In an embodiment, vesicles are isolated or captured as described herein, and one or more membrane protein labeling agent is used to detect the vesicles.

[0243] In some instances, a single binding agent can be employed to isolate or detect a vesicle. In other instances, a combination of different binding agents may be employed to isolate or detect a vesicle. For example, at least 2, 3, 4, 5, 6, 7, 8, 9, 10, 11, 12, 13, 14, 15, 16, 17, 18, 19, 20, 25, 50, 75 or 100 different binding agents may be used to isolate or detect a vesicle from a biological sample. Furthermore, the one or more different binding agents for a vesicle can form a biosignature of a vesicle, as further described below.

[0244] Different binding agents can also be used for multiplexing. For example, isolation or detection of more than one population of vesicles can be performed by isolating or detecting each vesicle population with a different binding agent. Different binding agents can be bound to different particles, wherein the different particles are labeled. In another embodiment, an array comprising different binding agents can be used for multiplex analysis, wherein the different binding agents are differentially labeled or can be ascertained based on the location of the binding agent on the array. Multiplexing can be accomplished up to the resolution capability of the labels or detection method, such as described below. The binding agents can be used to detect the vesicles, such as for detecting cell-of-origin specific vesicles. A binding agent or multiple binding agents can themselves form a binding agent profile that provides a biosignature for a vesicle. One or more binding agents can be selected from FIG. 2 of International Patent Publication No. WO/2011/127219, entitled “Circulating Biomarkers for Disease” and filed Apr. 6, 2011, which application is incorporated by reference in its entirety herein. For example, if a vesicle population is detected or isolated using two, three, four or more binding agents in a differential detection or isolation of a vesicle from a heterogeneous population of vesicles, the particular binding agent profile for the vesicle population provides a biosignature for the particular vesicle population. The vesicle can be detected using any number of binding agents in a multiplex fashion. Thus, the binding agent can also be used to form a biosignature for a vesicle. The biosignature can be used to characterize a phenotype.

[0245] The binding agent can be a lectin. Lectins are proteins that bind selectively to polysaccharides and glycoproteins and are widely distributed in plants and animals. For example, lectins such as those derived from Galanthus nivalis in the form of Galanthus nivalis agglutinin (“GNA”), Narcissus pseudonarcissus in the form of Narcissus pseudonarcissus agglutinin (“NPA”) and the blue green algae Nostoc ellipsosporum called “cyanovirin” (Boyd et al. Antimicrob Agents Chemother 41(7): 1521 1530, 1997; Hammar et al. Ann N Y Acad Sci 724: 166169, 1994; Kaku et al. Arch Biochem Biophys 279(2): 298 304, 1990) can be used to isolate a vesicle. These lectins can bind to glycoproteins having a high mannose content (Chervenak et al. Biochemistry 34(16): 5685 5695, 1995). High mannose glycoprotein refers to glycoproteins having mannose-mannose linkages in the form of α-1→3 or α-1→6 mannose-mannose linkages.

[0246] The binding agent can be an agent that binds one or more lectins. Lectin capture can be applied to the isolation of the biomarker cathepsin D since it is a glycosylated protein capable of binding the lectins Galanthus nivalis agglutinin (GNA) and concanavalin A (ConA).

[0247] Methods and devices for using lectins to capture vesicles are described in International Patent Publications WO/2011/066589, entitled “METHODS AND SYSTEMS FOR ISOLATING, STORING, AND ANALYZING VESICLES” and filed Nov. 30, 2010; WO/2010/065765, entitled “AFFINITY CAPTURE OF CIRCULATING BIOMARKERS” and filed Dec. 3, 2009; WO/2010/141862, entitled “METHODS AND MATERIALS FOR ISOLATING EXOSOMES” and filed Jun. 4, 2010; and WO/2007/103572, entitled “EXTRACORPOREAL REMOVAL OF MICROVESICULAR PARTICLES” and filed Mar. 9, 2007, each of which applications is incorporated by reference herein in its entirety.

[0248] The binding agent can be an antibody. For example, a vesicle may be isolated using one or more antibodies specific for one or more antigens present on the vesicle. For example, a vesicle can have CD63 on its surface, and an antibody, or capture antibody, for CD63 can be used to isolate the vesicle. Alternatively, a vesicle derived from a tumor cell can express EpCam, the vesicle can be isolated using an antibody for EpCam and CD63. Other antibodies for isolating vesicles can include an antibody, or capture antibody, to CD9, PSCA, TNFR, CD63, B7H3, MFG-E8, EpCam, Rab, CD81, STEAP, PCSA, PSMA, or 5T4. Other antibodies for isolating vesicles can include an antibody, or capture antibody, to DR3, STEAP, epha2, TMEM211, MFG-E8, Tissue Factor (TF), unc93A, A33, CD24, NGAL, EpCam, MUC17, TROP2, or TETS.

[0249] In some embodiments, the capture agent is an antibody to CD9, CD63, CD81, PSMA, PCSA, B7H3, EpCam, PSCA, ICAM, STEAP, or EGFR. The capture agent can also be used to identify a biomarker of a vesicle. For example, a capture agent such as an antibody to CD9 would identify CD9 as a biomarker of the vesicle. In some embodiments, a plurality of capture agents can be used, such as in multiplex analysis. The plurality of captures agents can comprise binding agents to one or more of CD9, CD63, CD81, PSMA, PCSA, B7H3, EpCam, PSCA, ICAM, STEAP, and EGFR. In some embodiments, the plurality of capture agents comprise binding agents to CD9, CD63, CD81, PSMA, PCSA, B7H3, MFG-E8, and/or EpCam. In yet other embodiments, the plurality of capture agents comprises binding agents to CD9, CD63, CD81, PSMA, PCSA, B7H3, EpCam, PSCA, ICAM, STEAP, and/or EGFR. The plurality of capture agents comprises binding agents to TMEM211, MFG-E8, Tissue Factor (TF), and/or CD24.

[0250] The antibodies referenced herein can be immunoglobulin molecules or immunologically active portions of immunoglobulin molecules, i.e., molecules that contain an antigen binding site that specifically binds an antigen and synthetic antibodies. The immunoglobulin molecules can be of any class (e.g., IgG, IgE, IgM, IgD or IgA) or subclass of immunoglobulin molecule. Antibodies include, but are not limited to, polyclonal, monoclonal, bispecific, synthetic, humanized and chimeric antibodies, single chain antibodies, Fab fragments and F(ab′)₂ fragments, Fv or Fv′ portions, fragments produced by a Fab expression library, anti-idiotypic (anti-Id) antibodies, or epitope-binding fragments of any of the above. An antibody, or generally any molecule, “binds specifically” to an antigen (or other molecule) if the antibody binds preferentially to the antigen, and, e.g., has less than about 30%, 20%, 10%, 5% or 1% cross-reactivity with another molecule.

[0251] The binding agent can also be a polypeptide or peptide. Polypeptide is used in its broadest sense and may include a sequence of subunit amino acids, amino acid analogs, or peptidomimetics. The subunits may be linked by peptide bonds. The polypeptides may be naturally occurring, processed forms of naturally occurring polypeptides (such as by enzymatic digestion), chemically synthesized or recombinantly expressed. The polypeptides for use in the methods of the present invention may be chemically synthesized using standard techniques. The polypeptides may comprise D-amino acids (which are resistant to L-amino acid-specific proteases), a combination of D- and L-amino acids, βamino acids, or various other designer or non-naturally occurring amino acids (e.g., β-methyl amino acids, Cα-methyl amino acids, and Nα-methyl amino acids, etc.) to convey special properties. Synthetic amino acids may include ornithine for lysine, and norleucine for leucine or isoleucine. In addition, the polypeptides can have peptidomimetic bonds, such as ester bonds, to prepare polypeptides with novel properties. For example, a polypeptide may be generated that incorporates a reduced peptide bond, i.e., R₁—CH₂—NH—R₂, where R₁ and R₂ are amino acid residues or sequences. A reduced peptide bond may be introduced as a dipeptide subunit. Such a polypeptide would be resistant to protease activity, and would possess an extended half-live in vivo. Polypeptides can also include peptoids (N-substituted glycines), in which the side chains are appended to nitrogen atoms along the molecule's backbone, rather than to the a-carbons, as in amino acids. Polypeptides and peptides are intended to be used interchangeably throughout this application, i.e. where the term peptide is used, it may also include polypeptides and where the term polypeptides is used, it may also include peptides. The term “protein” is also intended to be used interchangeably throughout this application with the terms “polypeptides” and “peptides” unless otherwise specified.

[0252] A vesicle may be isolated, captured or detected using a binding agent. The binding agent can be an agent that binds a vesicle “housekeeping protein,” or general vesicle biomarker. The biomarker can be CD63, CD9, CD81, CD82, CD37, CD53, Rab-5b, Annexin V, MFG-E8 or other commonly observed vesicle markers include those listed in Table 3. Furthermore, any of the markers disclosed herein or in Table 3 can be selected in identifying a candidate biosignature for a disease or condition, where the one or more selected biomarkers have a direct or indirect role or function in mechanisms involved in the disease or condition.

[0253] The binding agent can also be an agent that binds to a vesicle derived from a specific cell type, such as a tumor cell (e.g. binding agent for Tissue factor, EpCam, B7H3, RAGE or CD24) or a specific cell-of-origin. The binding agent used to isolate or detect a vesicle can be a binding agent for an antigen selected from FIG. 1 of International Patent Publication No. WO/2011/127219, entitled “Circulating Biomarkers for Disease” and filed Apr. 6, 2011, which application is incorporated by reference in its entirety herein. The binding agent for a vesicle can also be selected from those listed in FIG. 2 of International Patent Publication No. WO/2011/127219. The binding agent can be for an antigen such as a tetraspanin, MFG-E8, Annexin V, 5T4, B7H3, caveolin, CD63, CD9, E-Cadherin, Tissue factor, MFG-E8, TMEM211, CD24, PSCA, PCSA, PSMA, Rab-5B, STEAP, TNFR1, CD81, EpCam, CD59, CD81, ICAM, EGFR, or CD66. A binding agent for a platelet can be a glycoprotein such as GpIa-IIa, GpIIb-IIIa, GpIIIb, GpIb, or GpIX. A binding agent can be for an antigen comprising one or more of CD9, Erb2, Erb4, CD81, Erb3, MUC16, CD63, DLL4, HLA-Drpe, B7H3, IFNAR, 5T4, PCSA, MICB, PSMA, MFG-E8, Muc1, PSA, Muc2, Unc93a, VEGFR2, EpCAM, VEGF A, TMPRSS2, RAGE, PSCA, CD40, Muc17, IL-17-RA, and CD80. For example, the binding agent can be one or more of CD9, CD63, CD81, B7H3, PCSA, MFG-E8, MUC2, EpCam, RAGE and Muc17. One or more binding agents, such as one or more binding agents for two or more of the antigens, can be used for isolating or detecting a vesicle. The binding agent used can be selected based on the desire of isolating or detecting a vesicle derived from a particular cell type or cell-of-origin specific vesicle. The binding agent can be to one or more vesicle marker in Table 4.

[0254] A binding agent can also be linked directly or indirectly to a solid surface or substrate. A solid surface or substrate can be any physically separable solid to which a binding agent can be directly or indirectly attached including, but not limited to, surfaces provided by microarrays and wells, particles such as beads, columns, optical fibers, wipes, glass and modified or functionalized glass, quartz, mica, diazotized membranes (paper or nylon), polyformaldehyde, cellulose, cellulose acetate, paper, ceramics, metals, metalloids, semiconductive materials, quantum dots, coated beads or particles, other chromatographic materials, magnetic particles; plastics (including acrylics, polystyrene, copolymers of styrene or other materials, polypropylene, polyethylene, polybutylene, polyurethanes, polytetrafluoroethylene (PTFE, Teflon®), etc.), polysaccharides, nylon or nitrocellulose, resins, silica or silica-based materials including silicon and modified silicon, carbon, metals, inorganic glasses, plastics, ceramics, conducting polymers (including polymers such as polypyrole and polyindole); micro or nanostructured surfaces such as nucleic acid tiling arrays, nanotube, nanowire, or nanoparticulate decorated surfaces; or porous surfaces or gels such as methacrylates, acrylamides, sugar polymers, cellulose, silicates, or other fibrous or stranded polymers. In addition, as is known the art, the substrate may be coated using passive or chemically-derivatized coatings with any number of materials, including polymers, such as dextrans, acrylamides, gelatins or agarose. Such coatings can facilitate the use of the array with a biological sample.

[0255] For example, an antibody used to isolate a vesicle can be bound to a solid substrate such as a well, such as commercially available plates (e.g. from Nunc, Milan Italy). Each well can be coated with the antibody. In some embodiments, the antibody used to isolate a vesicle is bound to a solid substrate such as an array. The array can have a predetermined spatial arrangement of molecule interactions, binding islands, biomolecules, zones, domains or spatial arrangements of binding islands or binding agents deposited within discrete boundaries. Further, the term array may be used herein to refer to multiple arrays arranged on a surface, such as would be the case where a surface bore multiple copies of an array. Such surfaces bearing multiple arrays may also be referred to as multiple arrays or repeating arrays.

[0256] Arrays typically contain addressable moieties that can detect the presense of an entity, e.g., a vesicle in the sample via a binding event. An array may be referred to as a microarray. Arrays or microarrays include without limitation DNA microarrays, such as cDNA microarrays, oligonucleotide microarrays and SNP microarrays, microRNA arrays, protein microarrays, antibody microarrays, tissue microarrays, cellular microarrays (also called transfection microarrays), chemical compound microarrays, and carbohydrate arrays (glycoarrays). DNA arrays typically comprise addressable nucleotide sequences that can bind to sequences present in a sample. MicroRNA arrays, e.g., the MMChips array from the University of Louisville or commercial systems from Agilent, can be used to detect microRNAs. Protein microarrays can be used to identify protein-protein interactions, including without limitation identifying substrates of protein kinases, transcription factor protein-activation, or to identify the targets of biologically active small molecules. Protein arrays may comprise an array of different protein molecules, commonly antibodies, or nucleotide sequences that bind to proteins of interest. In a non-limiting example, a protein array can be used to detect vesicles having certain proteins on their surface. Antibody arrays comprise antibodies spotted onto the protein chip that are used as capture molecules to detect proteins or other biological materials from a sample, e.g., from cell or tissue lysate solutions. For example, antibody arrays can be used to detect vesicle-associated biomarkers from bodily fluids, e.g., serum or urine. Tissue microarrays comprise separate tissue cores assembled in array fashion to allow multiplex histological analysis. Cellular microarrays, also called transfection microarrays, comprise various capture agents, such as antibodies, proteins, or lipids, which can interact with cells to facilitate their capture on addressable locations. Cellular arrays can also be used to capture vesicles due to the similarity between a vesicle and cellular membrane. Chemical compound microarrays comprise arrays of chemical compounds and can be used to detect protein or other biological materials that bind the compounds. Carbohydrate arrays (glycoarrays) comprise arrays of carbohydrates and can detect, e.g., protein that bind sugar moieties. One of skill will appreciate that similar technologies or improvements can be used according to the methods of the invention.

[0257] A binding agent can also be bound to particles such as beads or microspheres. For example, an antibody specific for a component of a vesicle can be bound to a particle, and the antibody-bound particle is used to isolate a vesicle from a biological sample. In some embodiments, the microspheres may be magnetic or fluorescently labeled. In addition, a binding agent for isolating vesicles can be a solid substrate itself. For example, latex beads, such as aldehyde/sulfate beads (Interfacial Dynamics, Portland, Oreg.) can be used.

[0258] A binding agent bound to a magnetic bead can also be used to isolate a vesicle. For example, a biological sample such as serum from a patient can be collected for colon cancer screening. The sample can be incubated with anti-CCSA-3 (Colon Cancer-Specific Antigen) coupled to magnetic microbeads. A low-density microcolumn can be placed in the magnetic field of a MACS Separator and the column is then washed with a buffer solution such as Tris-buffered saline. The magnetic immune complexes can then be applied to the column and unbound, non-specific material can be discarded. The CCSA-3 selected vesicle can be recovered by removing the column from the separator and placing it on a collection tube. A buffer can be added to the column and the magnetically labeled vesicle can be released by applying the plunger supplied with the column. The isolated vesicle can be diluted in IgG elution buffer and the complex can then be centrifuged to separate the microbeads from the vesicle. The pelleted isolated cell-of-origin specific vesicle can be resuspended in buffer such as phosphate-buffered saline and quantitated. Alternatively, due to the strong adhesion force between the antibody captured cell-of-origin specific vesicle and the magnetic microbeads, a proteolytic enzyme such as trypsin can be used for the release of captured vesicles without the need for centrifugation. The proteolytic enzyme can be incubated with the antibody captured cell-of-origin specific vesicles for at least a time sufficient to release the vesicles.

[0259] A binding agent, such as an antibody, for isolating vesicles is preferably contacted with the biological sample comprising the vesicles of interest for at least a time sufficient for the binding agent to bind to a component of the vesicle. For example, an antibody may be contacted with a biological sample for various intervals ranging from seconds days, including but not limited to, about 10 minutes, 30 minutes, 1 hour, 3 hours, 5 hours, 7 hours, 10 hours, 15 hours, 1 day, 3 days, 7 days or 10 days.

[0260] A binding agent, such as an antibody specific to an antigen listed in FIG. 1 of International Patent Publication No. WO/2011/127219, entitled “Circulating Biomarkers for Disease” and filed Apr. 6, 2011, which application is incorporated by reference in its entirety herein, or a binding agent listed in FIG. 2 of International Patent Publication No. WO/2011/127219, can be labeled to facilitate detection. Appropriate labels include without limitation a magnetic label, a fluorescent moiety, an enzyme, a chemiluminescent probe, a metal particle, a non-metal colloidal particle, a polymeric dye particle, a pigment molecule, a pigment particle, an electrochemically active species, semiconductor nanocrystal or other nanoparticles including quantum dots or gold particles, fluorophores, quantum dots, or radioactive labels. Various protein, radioactive, fluorescent, enzymatic, and other labels are described further above.

[0261] A binding agent can be directly or indirectly labeled, e.g., the label is attached to the antibody through biotin-streptavidin. Alternatively, an antibody is not labeled, but is later contacted with a second antibody that is labeled after the first antibody is bound to an antigen of interest.

[0262] Depending on the method of isolation or detection used, the binding agent may be linked to a solid surface or substrate, such as arrays, particles, wells and other substrates described above. Methods for direct chemical coupling of antibodies, to the cell surface are known in the art, and may include, for example, coupling using glutaraldehyde or maleimide activated antibodies. Methods for chemical coupling using multiple step procedures include biotinylation, coupling of trinitrophenol (TNP) or digoxigenin using for example succinimide esters of these compounds. Biotinylation can be accomplished by, for example, the use of D-biotinyl-N-hydroxysuccinimide. Succinimide groups react effectively with amino groups at pH values above 7, and preferentially between about pH 8.0 and about pH 8.5. Biotinylation can be accomplished by, for example, treating the cells with dithiothreitol followed by the addition of biotin maleimide.

[0263] Particle-Based Assays

[0264] As an alternative to planar arrays, assays using particles or microspheres, such as bead based assays, are capable of use with a binding agent. For example, antibodies or aptamers are easily conjugated with commercially available beads. See, e.g., Fan et al., Illumina universal bead arrays. Methods Enzymol. 2006 410:57-73; Srinivas et al. Anal. Chem. 2011 Oct. 21, Aptamer functionalized Microgel Particles for Protein Detection; See also, review article on aptamers as therapeutic and diagnostic agents, Brody and Gold, Rev. Mol. Biotech. 2000, 74:5-13.

[0265] Multiparametric assays or other high throughput detection assays using bead coatings with cognate ligands and reporter molecules with specific activities consistent with high sensitivity automation can be used. In a bead based assay system, a binding agent for a biomarker or vesicle, such as a capture agent (e.g. capture antibody), can be immobilized on an addressable microsphere. Each binding agent for each individual binding assay can be coupled to a distinct type of microsphere (i.e., microbead) and the assay reaction takes place on the surface of the microsphere, such as depicted in FIG. 2B. A binding agent for a vesicle can be a capture antibody or aptamer coupled to a bead. Dyed microspheres with discrete fluorescence intensities are loaded separately with their appropriate binding agent or capture probes. The different bead sets carrying different binding agents can be pooled as desired to generate custom bead arrays. Bead arrays are then incubated with the sample in a single reaction vessel to perform the assay.

[0266] Various particle/bead substrates and systems useful for the methods of the invention are described further above.

[0267] Flow Cytometry

[0268] In various embodiments of the invention, flow cytometry, which is described in further detail above, is used to assess a microvesicle population in a biological sample. If desired, the microvesicle population can be sorted from other particles (e.g., cell debris, protein aggregates, etc) in a sample by labeling the vesicles using one or more general vesicle marker. The general vesicle marker can be a marker in Table 3. Commonly used vesicle markers include tetraspanins such as CD9, CD63 and/or CD81. Vesicles comprising one or more tetraspanin are sometimes referred to as “Tet+” herein to indicate that the vesicles are tetraspanin-positive. The sorted microvesicles can be further assessed using methodology described herein. E.g., surface antigens on the sorted microvesicles can be detected using flow or other methods. In some embodiments, payload within the sorted microvesicles is assessed. As an illustrative example, a population of microvesicles is contacted with a labeled binding agent to a surface antigen of interest, the contacted microvesicles are sorted using flow cytometry, and payload with the microvesicles is assessed. The payload may be polypeptides, nucleic acids (e.g., mRNA or microRNA) or other biological entities as desired. Such assessment is used to characterize a phenotype as described herein, e.g., to diagnose, prognose or theranose a cancer.

[0269] In an embodiment, flow sorting is used to distinguish microvesicle populations from other biological complexes. In a non-limiting example, Ago2+/Tet+ and Ago2+/Tet-particles are detected using flow methodology to separate Ago2+vesicles from vesicle-free Ago2+complexes, respectively.

[0270] Multiplexing

[0271] Multiplex experiments comprise experiments that can simultaneously measure multiple analytes in a single assay. Vesicles and associated biomarkers can be assessed in a multiplex fashion. Different binding agents can be used for multiplexing different circulating biomarkers, e.g., microRNA, protein, or vesicle populations. Different biomarkers, e.g., different vesicle populations, can be isolated or detected using different binding agents. Each population in a biological sample can be labeled with a different signaling label, such as a fluorophore, quantum dot, or radioactive label, such as described above. The label can be directly conjugated to a binding agent or indirectly used to detect a binding agent that binds a vesicle. The number of populations detected in a multiplexing assay is dependent on the resolution capability of the labels and the summation of signals, as more than two differentially labeled vesicle populations that bind two or more affinity elements can produce summed signals.

[0272] Multiplexing of at least 2, 3, 4, 5, 6, 7, 8, 9, 10, 11, 12, 13, 14, 15, 16, 17, 18, 19, 20, 25, 50, 75 or 100 different circulating biomarkers may be performed. For example, one population of vesicles specific to a cell-of-origin can be assayed along with a second population of vesicles specific to a different cell-of-origin, where each population is labeled with a different label. Alternatively, a population of vesicles with a particular biomarker or biosignature can be assayed along with a second population of vesicles with a different biomarker or biosignature. In some cases, hundreds or thousands of vesicles are assessed in a single assay.

[0273] In one embodiment, multiplex analysis is performed by applying a plurality of vesicles comprising more than one population of vesicles to a plurality of substrates, such as beads. Each bead is coupled to one or more capture agents. The plurality of beads is divided into subsets, where beads with the same capture agent or combination of capture agents form a subset of beads, such that each subset of beads has a different capture agent or combination of capture agents than another subset of beads. The beads can then be used to capture vesicles that comprise a component that binds to the capture agent. The different subsets can be used to capture different populations of vesicles. The captured vesicles can then be analyzed by detecting one or more biomarkers.

[0274] Flow cytometry can be used in combination with a particle-based or bead based assay. Multiparametric immunoassays or other high throughput detection assays using bead coatings with cognate ligands and reporter molecules with specific activities consistent with high sensitivity automation can be used. For example, beads in each subset can be differentially labeled from another subset. In a particle based assay system, a binding agent or capture agent for a vesicle, such as a capture antibody, can be immobilized on addressable beads or microspheres. Each binding agent for each individual binding assay (such as an immunoassay when the binding agent is an antibody) can be coupled to a distinct type of microsphere (i.e., microbead) and the binding assay reaction takes place on the surface of the microspheres. Microspheres can be distinguished by different labels, for example, a microsphere with a specific capture agent would have a different signaling label as compared to another microsphere with a different capture agent. For example, microspheres can be dyed with discrete fluorescence intensities such that the fluorescence intensity of a microsphere with a specific binding agent is different than that of another microsphere with a different binding agent. Biomarkers bound by different capture agents can be differentially detected using different labels.

[0275] A microsphere can be labeled or dyed with at least 2 different labels or dyes. In some embodiments, the microsphere is labeled with at least 3, 4, 5, 6, 7, 8, 9, or 10 different labels. Different microspheres in a plurality of microspheres can have more than one label or dye, wherein various subsets of the microspheres have various ratios and combinations of the labels or dyes permitting detection of different microspheres with different binding agents. For example, the various ratios and combinations of labels and dyes can permit different fluorescent intensities. Alternatively, the various ratios and combinations maybe used to generate different detection patters to identify the binding agent. The microspheres can be labeled or dyed externally or may have intrinsic fluorescence or signaling labels. Beads can be loaded separately with their appropriate binding agents and thus, different vesicle populations can be isolated based on the different binding agents on the differentially labeled microspheres to which the different binding agents are coupled.

[0276] In another embodiment, multiplex analysis can be performed using a planar substrate, wherein the substrate comprises a plurality of capture agents. The plurality of capture agents can capture one or more populations of vesicles, and one or more biomarkers of the captured vesicles detected. The planar substrate can be a microarray or other substrate as further described herein.

[0277] Binding Agents

[0278] A vesicle may be isolated or detected using a binding agent for a novel component of a vesicle, such as an antibody for a novel antigen specific to a vesicle of interest. Novel antigens that are specific to a vesicle of interest may be isolated or identified using different test compounds of known composition bound to a substrate, such as an array or a plurality of particles, which can allow a large amount of chemical/structural space to be adequately sampled using only a small fraction of the space. The novel antigen identified can also serve as a biomarker for the vesicle. For example, a novel antigen identified for a cell-of-origin specific vesicle can be a useful biomarker.

[0279] The term “agent” or “reagent” as used in respect to contacting a sample can mean any entity designed to bind, hybridize, associate with or otherwise detect or facilitate detection of a target molecule, including target polypeptides, peptides, nucleic acid molecules, leptins, lipids, or any other biological entity that can be detected as described herein or as known in the art. Examples of such agents/reagents are well known in the art, and include but are not limited to universal or specific nucleic acid primers, nucleic acid probes, antibodies, aptamers, peptoid, peptide nucleic acid, locked nucleic acid, lectin, dendrimer, chemical compound, or other entities described herein or known in the art.

[0280] A binding agent can be identified by screening either a homogeneous or heterogeneous vesicle population against test compounds. Since the composition of each test compound on the substrate surface is known, this constitutes a screen for affinity elements. For example, a test compound array comprises test compounds at specific locations on the substrate addressable locations, and can be used to identify one or more binding agents for a vesicle. The test compounds can all be unrelated or related based on minor variations of a core sequence or structure. The different test compounds may include variants of a given test compound (such as polypeptide isoforms), test compounds that are structurally or compositionally unrelated, or a combination thereof.

[0281] A test compound can be a peptoid, polysaccharide, organic compound, inorganic compound, polymer, lipids, nucleic acid, polypeptide, antibody, protein, polysaccharide, or other compound. The test compound can be natural or synthetic. The test compound can comprise or consist of linear or branched heteropolymeric compounds based on any of a number of linkages or combinations of linkages (e.g., amide, ester, ether, thiol, radical additions, metal coordination, etc.), dendritic structures, circular structures, cavity structures or other structures with multiple nearby sites of attachment that serve as scaffolds upon which specific additions are made. The test compound can be spotted on a substrate or synthesized in situ, using standard methods in the art. In addition, the test compound can be spotted or synthesized in situ in combinations in order to detect useful interactions, such as cooperative binding.

[0282] The test compound can be a polypeptide with known amino acid sequence, thus, detection of a test compound binding with a vesicle can lead to identification of a polypeptide of known amino sequence that can be used as a binding agent. For example, a homogenous population of vesicles can be applied to a spotted array on a slide containing between a few and 1,000,000 test polypeptides having a length of variable amino acids. The polypeptides can be attached to the surface through the C-terminus. The sequence of the polypeptides can be generated randomly from 19 amino acids, excluding cysteine. The binding reaction can include a non-specific competitor, such as excess bacterial proteins labeled with another dye such that the specificity ratio for each polypeptide binding target can be determined. The polypeptides with the highest specificity and binding can be selected. The identity of the polypeptide on each spot is known, and thus can be readily identified. Once the novel antigens specific to the homogeneous vesicle population, such as a cell-of-origin specific vesicle is identified, such cell-of-origin specific vesicles may subsequently be isolated using such antigens in methods described hereafter.

[0283] An array can also be used for identifying an antibody as a binding agent for a vesicle. Test antibodies can be attached to an array and screened against a heterogeneous population of vesicles to identify antibodies that can be used to isolate or identify a vesicle. A homogeneous population of vesicles such as cell-of-origin specific vesicles can also be screened with an antibody array. Other than identifying antibodies to isolate or detect a homogeneous population of vesicles, one or more protein biomarkers specific to the homogenous population can be identified. Commercially available platforms with test antibodies pre-selected or custom selection of test antibodies attached to the array can be used. For example, an antibody array from Full Moon Biosystems can be screened using prostate cancer cell derived vesicles identifying antibodies to Bcl-XL, ERCC1, Keratin 15, CD81/TAPA-1, CD9, Epithelial Specific Antigen (ESA), and Mast Cell Chymase as binding agents, and the proteins identified can be used as biomarkers for the vesicles. The biomarker can be present or absent, underexpressed or overexpressed, mutated, or modified in or on a vesicle and used in characterizing a condition.

[0284] An antibody or synthetic antibody to be used as a binding agent can also be identified through a peptide array. Another method is the use of synthetic antibody generation through antibody phage display. M13 bacteriophage libraries of antibodies (e.g. Fabs) are displayed on the surfaces of phage particles as fusions to a coat protein. Each phage particle displays a unique antibody and also encapsulates a vector that contains the encoding DNA. Highly diverse libraries can be constructed and represented as phage pools, which can be used in antibody selection for binding to immobilized antigens. Antigen-binding phages are retained by the immobilized antigen, and the nonbinding phages are removed by washing. The retained phage pool can be amplified by infection of an Escherichia coli host and the amplified pool can be used for additional rounds of selection to eventually obtain a population that is dominated by antigen-binding clones. At this stage, individual phase clones can be isolated and subjected to DNA sequencing to decode the sequences of the displayed antibodies. Through the use of phase display and other methods known in the art, high affinity designer antibodies for vesicles can be generated.

[0285] Bead-based assays can also be used to identify novel binding agents to isolate or detect a vesicle. A test antibody or peptide can be conjugated to a particle. For example, a bead can be conjugated to an antibody or peptide and used to detect and quantify the proteins expressed on the surface of a population of vesicles in order to discover and specifically select for novel antibodies that can target vesicles from specific tissue or tumor types. Any molecule of organic origin can be successfully conjugated to a polystyrene bead through use of a commercially available kit according to manufacturer's instructions. Each bead set can be colored a certain detectable wavelength and each can be linked to a known antibody or peptide which can be used to specifically measure which beads are linked to exosomal proteins matching the epitope of previously conjugated antibodies or peptides. The beads can be dyed with discrete fluorescence intensities such that each bead with a different intensity has a different binding agent as described above.

[0286] For example, a purified vesicle preparation can be diluted in assay buffer to an appropriate concentration according to empirically determined dynamic range of assay. A sufficient volume of coupled beads can be prepared and approximately 1 μl of the antibody-coupled beads can be aliquoted into a well and adjusted to a final volume of approximately 50 μl. Once the antibody-conjugated beads have been added to a vacuum compatible plate, the beads can be washed to ensure proper binding conditions. An appropriate volume of vesicle preparation can then be added to each well being tested and the mixture incubated, such as for 15-18 hours. A sufficient volume of detection antibodies using detection antibody diluent solution can be prepared and incubated with the mixture for 1 hour or more. The beads can then be washed before the addition of detection antibody (biotin expressing) mixture composed of streptavidin phycoereythin. The beads can then be washed and vacuum aspirated several times before analysis on a suspension array system using software provided with an instrument. The identity of antigens that can be used to selectively extract the vesicles can then be elucidated from the analysis.

[0287] Assays using imaging systems can be used to detect and quantify proteins expressed on the surface of a vesicle in order to discover and specifically select for and enrich vesicles from specific tissue, cell or tumor types. Antibodies, peptides or cells conjugated to multiple well multiplex carbon coated plates can be used. Simultaneous measurement of many analytes in a well can be achieved through the use of capture antibodies arrayed on the patterned carbon working surface. Analytes can then be detected with antibodies labeled with reagents in electrode wells with an enhanced electro-chemiluminescent plate. Any molecule of organic origin can be successfully conjugated to the carbon coated plate. Proteins expressed on the surface of vesicles can be identified from this assay and can be used as targets to specifically select for and enrich vesicles from specific tissue or tumor types.

[0288] The binding agent can also be an aptamer to a specific target. The term “specific” as used herein in regards to a binding agent can mean that an agent has a greater affinity for its target than other targets, typically with a much great affinity, but does not require that the binding agent is absolutely specific for its target.

[0289] Microfluidics

[0290] The methods for isolating or identifying vesicles can be used in combination with microfluidic devices. The methods of isolating or detecting a vesicle, such as described herein, can be performed using a microfluidic device. Microfluidic devices, which may also be referred to as “lab-on-a-chip” systems, biomedical micro-electro-mechanical systems (bioMEMs), or multicomponent integrated systems, can be used for isolating and analyzing a vesicle. Such systems miniaturize and compartmentalize processes that allow for binding of vesicles, detection of biosignatures, and other processes.

[0291] A microfluidic device can also be used for isolation of a vesicle through size differential or affinity selection. For example, a microfluidic device can use one more channels for isolating a vesicle from a biological sample based on size or by using one or more binding agents for isolating a vesicle from a biological sample. A biological sample can be introduced into one or more microfluidic channels, which selectively allows the passage of a vesicle. The selection can be based on a property of the vesicle, such as the size, shape, deformability, or biosignature of the vesicle.

[0292] In one embodiment, a heterogeneous population of vesicles can be introduced into a microfluidic device, and one or more different homogeneous populations of vesicles can be obtained. For example, different channels can have different size selections or binding agents to select for different vesicle populations. Thus, a microfluidic device can isolate a plurality of vesicles wherein at least a subset of the plurality of vesicles comprises a different biosignature from another subset of the plurality of vesicles. For example, the microfluidic device can isolate at least 2, 3, 4, 5, 6, 7, 8, 9, 10, 15, 20, 25, 30, 40, 50, 60, 70, 80, 90, or 100 different subsets of vesicles, wherein each subset of vesicles comprises a different biosignature.

[0293] In some embodiments, the microfluidic device can comprise one or more channels that permit further enrichment or selection of a vesicle. A population of vesicles that has been enriched after passage through a first channel can be introduced into a second channel, which allows the passage of the desired vesicle or vesicle population to be further enriched, such as through one or more binding agents present in the second channel.

[0294] Array-based assays and bead-based assays can be used with microfluidic device. For example, the binding agent can be coupled to beads and the binding reaction between the beads and vesicle can be performed in a microfluidic device. Multiplexing can also be performed using a microfluidic device. Different compartments can comprise different binding agents for different populations of vesicles, where each population is of a different cell-of-origin specific vesicle population. In one embodiment, each population has a different biosignature. The hybridization reaction between the microsphere and vesicle can be performed in a microfluidic device and the reaction mixture can be delivered to a detection device. The detection device, such as a dual or multiple laser detection system can be part of the microfluidic system and can use a laser to identify each bead or microsphere by its color-coding, and another laser can detect the hybridization signal associated with each bead.

[0295] Various microfluidic devices and methods are described above.

[0296] Combined Isolation Methodology

[0297] One of skill will appreciate that various methods of sample treatment and isolating and concentrating circulating biomarkers such as vesicles can be combined as desired. For example, a biological sample can be treated to prevent aggregation, remove undesired particulate and/or deplete highly abundant proteins. The steps used can be chosen to optimize downstream analysis steps. Next, biomarkers such as vesicles can be isolated, e.g., by chromotography, centrifugation, density gradient, filtration, precipitation, or affinity techniques. Any number of the later steps can be combined, e.g., a sample could be subjected to one or more of chromotography, centrifugation, density gradient, filtration and precipitation in order to isolate or concentrate all or most microvesicles. In a subsequent step, affinity techniques, e.g., using binding agents to one or more target of interest, can be used to isolate or identify microvesicles carrying desired biomarker profiles. Microfluidic systems can be employed to perform some or all of these steps.

[0298] An exemplary yet non-limiting isolation scheme for isolating and analysis of microvesicles includes the following: Plasma or serum collection->highly abundant protein removal->ultrafiltration->nanomembrane concentration->flow cytometry or particle-based assay.

[0299] Using the methods disclosed herein or known in the art, circulating biomarkers such as vesicles can be isolated or concentrated by at least about 2-fold, 3-fold, 1-fold, 2-fold, 3-fold, 4-fold, 5-fold, 6-fold, 7-fold, 8-fold, 9-fold, 10-fold, 12-fold, 15-fold, 20-fold, 25-fold, 30-fold, 35-fold, 40-fold, 45-fold, 50-fold, 55-fold, 60-fold, 65-fold, 70-fold, 75-fold, 80-fold, 90-fold, 95-fold, 100-fold, 110-fold, 120-fold, 125-fold, 130-fold, 140-fold, 150-fold, 160-fold, 170-fold, 175-fold, 180-fold, 190-fold, 200-fold, 205-fold, 250-fold, 275-fold, 300-fold, 325-fold, 350-fold, 375-fold, 400-fold, 425-fold, 450-fold, 475-fold, 500-fold, 525-fold, 550-fold, 575-fold, 600-fold, 625-fold, 650-fold, 675-fold, 700-fold, 725-fold, 750-fold, 775-fold, 800-fold, 825-fold, 850-fold, 875-fold, 900-fold, 925-fold, 950-fold, 975-fold, 1000-fold, 1500-fold, 2000-fold, 2500-fold, 3000-fold, 4000-fold, 5000-fold, 6000-fold, 7000-fold, 8000-fold, 9000-fold, or at least 10,000-fold. In some embodiments, the vesicles are isolated or concentrated concentrated by at least 1 order of magnitude, 2 orders of magnitude, 3 orders of magnitude, 4 orders of magnitude, 5 orders of magnitude, 6 orders of magnitude, 7 orders of magnitude, 8 orders of magnitude, 9 orders of magnitude, or 10 orders of magnitude or more.

[0300] Once concentrated or isolated, the circulating biomarkers can be assessed, e.g., in order to characterize a phenotype as described herein. In some embodiments, the concentration or isolation steps themselves shed light on the phenotype of interest. For example, affinity methods can detect the presence or level of specific biomarkers of interest.

[0301] The various isolation and detection systems described herein can be used to isolate or detect circulating biomarkers such as vesicles that are informative for diagnosis, prognosis, disease stratification, theranosis, prediction of responder/non-responder status, disease monitoring, treatment monitoring and the like as related to such diseases and disorders. Combinations of the isolation techniques are within the scope of the invention. In a non-limiting example, a sample can be run through a chromatography column to isolate vesicles based on a property such as size of electrophoretic motility, and the vesicles can then be passed through a microfluidic device. Binding agents can be used before, during or after these steps.

[0302] The methods and compositions of the invention can be used with microvesicles isolated or detected using such methods as described herein. In various non-limiting examples: an aptamer provided by the methods of the invention can be used as a capture and/or detector agent for a biomarker such as a protein or microvesicle; a sample such as a bodily fluid can be contacted with an oligonucleotide probe library of the invention before microvesicles in the sample are isolated using one or more technique described herein (e.g., chromatography, centrifugation, flow cytometry, filtration, affinity isolation, polymer precipitation, etc); microvesicles in a sample are isolated using one or more technique described herein (e.g., chromatography, centrifugation, flow cytometry, filtration, affinity isolation, polymer precipitation, etc) before contacting the microvesicles with an aptamer or oligonucleotide probe library of the invention. Contaminants such as highly abundant proteins can be removed in whole or in part at any appropriate step in such processes. These and various other useful iterations of such techniques for assessment of microvesicles and other biomarkers are contemplated by the invention.

### Biomarkers

[0303] As described herein, the methods and compositions of the invention can be used in assays to detect the presence or level of one or more biomarker of interest. The biomarker can be any useful biomarker disclosed herein or known to those of skill in the art. In an embodiment, the biomarker comprises a protein or polypeptide. As used herein, “protein,” “polypeptide” and “peptide” are used interchangeably unless stated otherwise. The biomarker can be a nucleic acid, including DNA, RNA, and various subspecies of any thereof as disclosed herein or known in the art. The biomarker can comprise a lipid. The biomarker can comprise a carbohydrate. The biomarker can also be a complex, e.g., a complex comprising protein, nucleic acids, lipids and/or carbohydrates. In some embodiments, the biomarker comprises a microvesicle. In an embodiment, the invention provides a method wherein a pool of aptamers is used to assess the presence and/or level of a population of microvesicles of interest without knowing the precise microvesicle antigen targeted by each member of the pool. See, e.g., FIGS. 19B-C. In other cases, biomarkers associated with microvesicles are assessed according to the methods of the invention. See, e.g., FIGS. 2A-F; FIG. 19A.

[0304] A biosignature comprising more than one biomarker can comprise one type of biomarker or multiple types of biomarkers. As a non-limiting example, a biosignature can comprise multiple proteins, multiple nucleic acids, multiple lipids, multiple carbohydrates, multiple biomarker complexes, multiple microvesicles, or a combination of any thereof. For example, the biosignature may comprise one or more microvesicle, one or more protein, and one or more microRNA, wherein the one or more protein and/or one or more microRNA is optionally in association with the microvesicle as a surface antigen and/or payload, as appropriate.

[0305] In some embodiments, vesicles are detected using vesicle surface antigens. A commonly expressed vesicle surface antigen can be referred to as a“housekeeping protein,” or general vesicle biomarker. The biomarker can be CD63, CD9, CD81, CD82, CD37, CD53, Rab-5b, Annexin V or MFG-E8. Tetraspanins, family of membrane proteins with four transmembrane domains, can be used as general vesicle biomarkers. The tetraspanins include CD151, CD53, CD37, CD82, CD81, CD9 and CD63. There have been over 30tetraspanins identifiedin mammals, including the TSPAN1 (TSP-1), TSPAN2 (TSP-2), TSPAN3 (TSP-3), TSPAN4 (TSP-4, NAG-2), TSPAN5 (TSP-5), TSPAN6 (TSP-6), TSPAN7 (CD231, TALLA-1, A15), TSPAN8 (CO-029), TSPAN9 (NET-5), TSPAN10 (Oculospanin), TSPAN (CD151-like), TSPAN2(NET-2), TSPAN13 (NET-6), TSPAN14, TSPAN15 (NET-7), TSPAN6 (TM4-B), TSPAN7, TSPAN18, TSPAN19, TSPAN20 (UP1b, UPK1B), TSPAN21 (UP1a, UPK1A), TSPAN22(RDS, PRPH2), TSPAN23 (ROM1), TSPAN24 (CD151), TSPAN25 (CD53), TSPAN26 (CD37), TSPAN27(CD82), TSPAN28 (CD81), TSPAN29(CD9), TSPAN30 (CD63), TSPAN31 (SAS), TSPAN32 (TSSC6), TSPAN33, and TSPAN34. Other commonly observed vesicle markers include those listed in Table 3. One or more of these proteins can be useful biomarkers for the characterizing phenotype using the subject methods and compositions.

TABLE 3
Proteins Observed in Vesicles from Multiple Cell Types

| Class | Protein |
|---|---|
| Antigen Presentation | MHC class I, MHC class II, Integrins, Alpha 4 beta 1, Alpha M beta 2, |
| | Beta 2 |
| Immunoglobulin family | ICAM1/CD54, P-selection |
| Cell-surface peptidases | Dipeptidylpeptidase IV/CD26, Aminopeptidase n/CD13 |
| Tetraspanins | CD151, CD53, CD37, CD82, CD81, CD9 and CD63 |
| Heat-shock proteins | Hsp70, Hsp84/90 |
| Cytoskeletal proteins | Actin, Actin-binding proteins, Tubulin |
| Membrane transport | Annexin I, Annexin II, Annexin IV, Annexin V, Annexin VI, |
| and fusion | RAB7/RAP1B/RADGDI |
| Signal transduction | Gi2alpha/14-3-3, CBL/LCK |
| Abundant membrane | CD63, GAPDH, CD9, CD81, ANXA2, ENO1, SDCBP, MSN, MFGE8, |
| proteins | EZR, GK, ANXA1, LAMP2, DPP4, TSG101, HSPA1A, GDI2, CLTC, |
| | LAMP1, Cd86, ANPEP, TFRC, SLC3A2, RDX, RAP1B, RAB5C, |
| | RAB5B, MYH9, ICAM1, FN1, RAB11B, PIGR, LGALS3, ITGB1, |
| | EHD1, CLIC1, ATP1A1, ARF1, RAP1A, P4HB, MUC1, KRT10, HLA- |
| | A, FLOT1, CD59, C1orf58, BASP1, TACSTD1, STOM |
| Other Transmembrane | Cadherins: CDH1, CDH2, CDH12, CDH3, Deomoglein, DSG1, DSG2, |
| Proteins | DSG3, DSG4, Desmocollin, DSC1, DSC2, DSC3, Protocadherins, |
| | PCDH1, PCDH10, PCDH11x, PCDH11y, PCDH12, FAT, FAT2, FAT4, |
| | PCDH15, PCDH17, PCDH18, PCDH19; PCDH20; PCDH7, PCDH8, |
| | PCDH9, PCDHA1, PCDHA10, PCDHA11, PCDHA12, PCDHA13, |
| | PCDHA2, PCDHA3, PCDHA4, PCDHA5, PCDHA6, PCDHA7, |
| | PCDHA8, PCDHA9, PCDHAC1, PCDHAC2, PCDHB1, PCDHB10, |
| | PCDHB11, PCDHB12, PCDHB13, PCDHB14, PCDHB15, PCDHB16, |
| | PCDHB17, PCDHB18, PCDHB2, PCDHB3, PCDHB4, PCDHB5, |
| | PCDHB6, PCDHB7, PCDHB8, PCDHB9, PCDHGA1, PCDHGA10, |
| | PCDHGA11, PCDHGA12, PCDHGA2; PCDHGA3, PCDHGA4, |
| | PCDHGA5, PCDHGA6, PCDHGA7, PCDHGA8, PCDHGA9, |
| | PCDHGB1, PCDHGB2, PCDHGB3, PCDHGB4, PCDHGB5, |
| | PCDHGB6, PCDHGB7, PCDHGC3, PCDHGC4, PCDHGC5, CDH9 |
| | (cadherin 9, type 2 (T1-cadherin)), CDH10 (cadherin 10, type 2 (T2- |
| | cadherin)), CDH5 (VE-cadherin (vascular endothelial)), CDH6 (K- |
| | cadherin (kidney)), CDH7 (cadherin 7, type 2), CDH8 (cadherin 8, type |
| | 2), CDH11 (OB-cadherin (osteoblast)), CDH13 (T-cadherin - H-cadherin |
| | (heart)), CDH15 (M-cadherin (myotubule)), CDH16 (KSP-cadherin), |
| | CDH17 (LI cadherin (liver-intestine)), CDH18 (cadherin 18, type 2), |
| | CDH19 (cadherin 19, type 2), CDH20 (cadherin 20, type 2), CDH23 |
| | (cadherin 23, (neurosensory epithelium)), CDH10, CDH11, CDH13, |
| | CDH15, CDH16, CDH17, CDH18, CDH19, CDH20, CDH22, CDH23, |
| | CDH24, CDH26, CDH28, CDH4, CDH5, CDH6, CDH7, CDH8, CDH9, |
| | CELSR1, CELSR2, CELSR3, CLSTN1, CLSTN2, CLSTN3, DCHS1, |
| | DCHS2, LOC389118, PCLKC, RESDA1, RET |

[0306] Any of the types of biomarkers or specific biomarkers described herein can be used and/or assessed via the subject methods and compositions, e.g., to identify a useful biosignature. Exemplary biomarkers include without limitation those in Table 4. The markers can be detected as protein, RNA or DNA as appropriate, which can be circulating freely or in a complex with other biological molecules. As appropriate, the markers in Table 4 can also be used for capture and/or detection of vesicles for characterizing phenotypes as disclosed herein. In some cases, multiple capture and/or detectors are used to enhance the characterization. The markers can be detected as protein or as mRNA, which can be circulating freely or in a complex with other biological molecules. See, e.g., FIGS. 2D-E. The markers can be detected as vesicle surface antigens and/or vesicle payload. The “Illustrative Class” indicates indications for which the markers are known markers. Those of skill will appreciate that the markers can also be used in alternate settings in certain instances. For example, a marker which can be used to characterize one type disease may also be used to characterize another disease as appropriate. Consider a non-limiting example of a tumor marker which can be used as a biomarker for tumors from various lineages. The biomarker references in Tables 3 and 4 are those commonly used in the art. Gene aliases and descriptions can be found using a variety of online databases, including GeneCards® (www.genecards.org), HUGO Gene Nomenclature (www.genenames.org), Entrez Gene (www.ncbi.nlm.nih.gov/entrez/query.fcgi?db=gene), UniProtKB/Swiss-Prot (www.uniprot.org), UniProtKB/TrEMBL (www.uniprot.org), OMIM (www.ncbi.nlm.nih.gov/entrez/query.fcgi?db=OMIM), GeneLoc (genecards.weizmann.ac.il/geneloc/), and Ensembl (www.ensembl.org). Generally, gene symbols and names below correspond to those approved by HUGO, and protein names are those recommended by UniProtKB/Swiss-Prot. Common alternatives are provided as well. In some cases, biomarkers are referred to by Ensembl reference numbers, which are of the form “ENSG” followed by a number, e.g., ENSG00000005893 which corresponds to LAMP2. In Table 4, solely for sake of brevity, “E.” is sometimes used to represent “ENSG00000”. For example, “E.005893 represents “ENSG00000005893.” Where a protein name indicates a precursor, the mature protein is also implied. Throughout the application, gene and protein symbols may be used interchangeably and the meaning can be derived from context as necessary.

TABLE 4
Illustrative Biomarkers

| Illustrative Class | Biomarkers |
|---|---|
| Drug associated | ABCC1, ABCG2, ACE2, ADA, ADH1C, ADH4, AGT, AR, AREG, ASNS, BCL2, BCRP, |
| targets and | BDCA1, beta III tubulin, BIRC5, B-RAF, BRCA1, BRCA2, CA2, caveolin, CD20, CD25, |
| prognostic markers | CD33, CD52, CDA, CDKN2A, CDKN1A, CDKN1B, CDK2, CDW52, CES2, CK 14, CK |
| | 17, CK 5/6, c-KIT, c-Met, c-Myc, COX-2, Cyclin D1, DCK, DHFR, DNMT1, DNMT3A, |
| | DNMT3B, E-Cadherin, ECGF1, EGFR, EML4-ALK fusion, EPHA2, Epiregulin, ER, |
| | ERBR2, ERCC1, ERCC3, EREG, ESR1, FLT1, folate receptor, FOLR1, FOLR2, FSHB, |
| | FSHPRH1, FSHR, FYN, GART, GNA11, GNAQ, GNRH1, GNRHR1, GSTP1, HCK, |
| | HDAC1, hENT-1, Her2/Neu, HGF, HIF1A, HIG1, HSP90, HSP90AA1, HSPCA, IGF-1R, |
| | IGFRBP, IGFRBP3, IGFRBP4, IGFRBP5, IL13RA1, IL2RA, KDR, Ki67, KIT, K-RAS, |
| | LCK, LTB, Lymphotoxin Beta Receptor, LYN, MET, MGMT, MLH1, MMR, MRP1, |
| | MS4A1, MSH2, MSH5, Myc, NFKB1, NFKB2, NFKBIA, NRAS, ODC1, OGFR, p16, p21, |
| | p27, p53, p95, PARP-1, PDGFC, PDGFR, PDGFRA, PDGFRB, PGP, PGR, PI3K, POLA, |
| | POLA1, PPARG, PPARGC1, PR, PTEN, PTGS2, PTPN12, RAF1, RARA, ROS1, RRM1, |
| | RRM2, RRM2B, RXRB, RXRG, SIK2, SPARC, SRC, SSTR1, SSTR2, SSTR3, SSTR4, |
| | SSTR5, Survivin, TK1, TLE3, TNF, TOP1, TOP2A, TOP2B, TS, TUBB3, TXN, TXNRD1, |
| | TYMS, VDR, VEGF, VEGFA, VEGFC, VHL, YES1, ZAP70 |
| Drug associated | ABL1, STK11, FGFR2, ERBB4, SMARCB1, CDKN2A, CTNNB1, FGFR1, FLT3, |
| targets and | NOTCH1, NPM1, SRC, SMAD4, FBXW7, PTEN, TP53, AKT1, ALK, APC, CDH1, C-Met, |
| prognostic markers | HRAS, IDH1, JAK2, MPL, PDGFRA, SMO, VHL, ATM, CSF1R, FGFR3, GNAS, ERBB2, |
| | HNF1A, JAK3, KDR, MLH1, PTPN11, RB1, RET, c-Kit, EGFR, PIK3CA, NRAS, GNA11, |
| | GNAQ, KRAS, BRAF |
| Drug associated | ALK, AR, BRAF, cKIT, cMET, EGFR, ER, ERCC1, GNA11, HER2, IDH1, KRAS, MGMT, |
| targets and | MGMT promoter methylation, NRAS, PDGFRA, Pgp, PIK3CA, PR, PTEN, ROS1, RRM1, |
| prognostic markers | SPARC, TLE3, TOP2A, TOPO1, TS, TUBB3, VHL |
| Drug associated | ABL1, AKT1, ALK, APC, AR, ATM, BRAF, BRAF, BRCA1, BRCA2, CDH1, cKIT, |
| targets | cMET, CSF1R, CTNNB1, EGFR, EGFR (H-score), EGFRvIII, ER, ERBB2 (HER2), |
| | ERBB4, ERCC1, FBXW7, FGFR1, FGFR2, FLT3, GNA11, GNAQ, GNAS, HER2, |
| | HNF1A, HRAS, IDH1, IDH2, JAK2, JAK3, KDR (VEGFR2), KRAS, MGMT, MGMT |
| | Promoter Methylation, microsatellite instability (MSI), MLH1, MPL, MSH2, MSH6, |
| | NOTCH1, NPM1, NRAS, PD-1, PDGFRA, PD-L1, Pgp, PIK3CA, PMS2, PR, PTEN, |
| | PTPN11, RB1, RET, ROS1, RRM1, SMAD4, SMARCB1, SMO, SPARC, STK11, TLE3, |
| | TOP2A, TOPO1, TP53, TS, TUBB3, VHL |
| Drug associated | 1p19q co-deletion, ABL1, AKT1, ALK, APC, AR, ARAF, ATM, BAP1, BRAF, BRCA1, |
| targets | BRCA2, CDH1, CHEK1, CHEK2, cKIT, cMET, CSF1R, CTNNB1, DDR2, EGFR, |
| | EGFRvIII, ER, ERBB2 (HER2), ERBB3, ERBB4, ERCC1, FBXW7, FGFR1, FGFR2, FLT3, |
| | GNA11, GNAQ, GNAS, H3K36me3, HER2, HNF1A, HRAS, IDH1, IDH2, JAK2, JAK3, |
| | KDR (VEGFR2), KRAS, MDMT, MGMT, MGMT Methylation, Microsatellite instability, |
| | MLH1, MPL, MSH2, MSH6, NF1, NOTCH1, NPM1, NRAS, NY-ESO-1, PD-1, PDGFRA, |
| | PD-L1, Pgp, PIK3CA, PMS2, PR, PTEN, PTPN11, RAF1, RB1, RET, ROS1, ROS1, RRM1, |
| | SMAD4, SMARCB1, SMO, SPARC, STK11, TLE3, TOP2A, TOPO1, TP53, TRKA, TS, |
| | TUBB3, VHL, WT1 |
| Drug associated | ABL1, AKT1, ALK, APC, AR, ATM, BRAF, BRAF, BRCA1, BRCA2, CDH1, cKIT, |
| targets | cMET, CSF1R, CTNNB1, EGFR, EGFR (H-score), EGFRvIII, ER, ERBB2 (HER2), |
| | ERBB4, ERCC1, FBXW7, FGFR1, FGFR2, FLT3, GNA11, GNAQ, GNAS, HER2, |
| | HNF1A, HRAS, IDH1, IDH2, JAK2, JAK3, KDR (VEGFR2), KRAS, MGMT, MGMT |
| | Promoter Methylation, microsatellite instability (MSI), MLH1, MPL, MSH2, MSH6, |
| | NOTCH1, NPM1, NRAS, PD-1, PDGFRA, PD-L1, Pgp, PIK3CA, PMS2, PR, PTEN, |
| | PTPN11, RB1, RET, ROS1, RRM1, SMAD4, SMARCB1, SMO, SPARC, STK11, TLE3, |
| | TOP2A, TOPO1, TP53, TS, TUBB3, VHL |
| Drug associated | 1p19q, ALK, ALK (2p23), Androgen Receptor, BRCA, cMET, EGFR, EGFR, EGFRvIII, |
| targets | ER, ERCC1, Her2, Her2/Neu, MGMT, MGMT Promoter Methylation, microsatellite |
| | instability (MSI), MLH1, MSH2, MSH6, PD-1, PD-L1, PMS2, PR, PTEN, ROS1, RRM1, |
| | TLE3, TOP2A, TOP2A, TOPO1, TS, TUBB3 |
| Drug associated | TOP2A, Chromosome 17 alteration, PBRM1 (PB1/BAF180), BAP1, SETD2 (ANTI- |
| targets | HISTONE H3), MDM2, Chromosome 12 alteration, ALK, CTLA4, CD3, NY-ESO-1, |
| | MAGE-A, TP, EGFR |
| 5-aminosalicyclic | μ-protocadherin, KLF4, CEBPα |
| acid (5-ASA) | |
| efficacy | |
| Cancer treatment | AR, AREG (Amphiregulin), BRAF, BRCA1, cKIT, cMET, EGFR, EGFR w/T790M, EML4- |
| associated markers | ALK, ER, ERBB3, ERBB4, ERCC1, EREG, GNA11, GNAQ, hENT-1, Her2, Her2 Exon 20 |
| | insert, IGF1R, Ki67, KRAS, MGMT, MGMT methylation, MSH2, MSI, NRAS, PGP |
| | (MDR1), PIK3CA, PR, PTEN, ROS1, ROS1 translocation, RRM1, SPARC, TLE3, TOPO1, |
| | TOPO2A, TS, TUBB3, VEGFR2 |
| Cancer treatment | AR, AREG, BRAF, BRCA1, cKIT, cMET, EGFR, EGFR w/T790M, EML4-ALK, ER, |
| associated markers | ERBB3, ERBB4, ERCC1, EREG, GNA11, GNAQ, Her2, Her2 Exon 20 insert, IGFR1, Ki67, |
| | KRAS, MGMT-Me, MSH2, MSI, NRAS, PGP (MDR-1), PIK3CA, PR, PTEN, ROS1 |
| | translocation, RRM1, SPARC, TLE3, TOPO1, TOPO2A, TS, TUBB3, VEGFR2 |
| Colon cancer | AREG, BRAF, EGFR, EML4-ALK, ERCC1, EREG, KRAS, MSI, NRAS, PIK3CA, PTEN, |
| treatment | TS, VEGFR2 |
| associated markers | |
| Colon cancer | AREG, BRAF, EGFR, EML4-ALK, ERCC1, EREG, KRAS, MSI, NRAS, PIK3CA, PTEN, |
| treatment | TS, VEGFR2 |
| associated markers | |
| Melanoma | BRAF, cKIT, ERBB3, ERBB4, ERCC1, GNA11, GNAQ, MGMT, MGMT methylation, |
| treatment | NRAS, PIK3CA, TUBB3, VEGFR2 |
| associated markers | |
| Melanoma | BRAF, cKIT, ERBB3, ERBB4, ERCC1, GNA11, GNAQ, MGMT-Me, NRAS, PIK3CA, |
| treatment | TUBB3, VEGFR2 |
| associated markers | |
| Ovarian cancer | BRCA1, cMET, EML4-ALK, ER, ERBB3, ERCC1, hENT-1, HER2, IGF1R, PGP(MDR1), |
| treatment | PIK3CA, PR, PTEN, RRM1, TLE3, TOPO1, TOPO2A, TS |
| associated markers | |
| Ovarian cancer | BRCA1, cMET, EML4-ALK (translocation), ER, ERBB3, ERCC1, HER2, PIK3CA, PR, |
| treatment | PTEN, RRM1, TLE3, TS |
| associated markers | |
| Breast cancer | BRAF, BRCA1, EGFR, EGFR T790M, EML4-ALK, ER, ERBB3, ERCC1, HER2, Ki67, |
| treatment | PGP (MDR1), PIK3CA, PR, PTEN, ROS1, ROS1 translocation, RRM1, TLE3, TOPO1, |
| associated markers | TOPO2A, TS |
| Breast cancer | BRAF, BRCA1, EGFR w/T790M, EML4-ALK, ER, ERBB3, ERCC1, HER2, Ki67, KRAS, |
| treatment | PIK3CA, PR, PTEN, ROS1 translocation, RRM1, TLE3, TOPO1, TOPO2A, TS |
| associated markers | |
| NSCLC cancer | BRAF, BRCA1, cMET, EGFR, EGFR w/T790M, EML4-ALK, ERCC1, Her2 Exon 20 |
| treatment | insert, KRAS, MSH2, PIK3CA, PTEN, ROS1 (trans), RRM1, TLE3, TS, VEGFR2 |
| associated markers | |
| NSCLC cancer | BRAF, cMET, EGFR, EGFR w/T790M, EML4-ALK, ERCC1, Her2 Exon 20 insert, KRAS, |
| treatment | MSH2, PIK3CA, PTEN, ROS1 translocation, RRM1, TLE3, TS |
| associated markers | |
| Mutated in cancers | AKT1, ALK, APC, ATM, BRAF, CDH1, CDKN2A, c-Kit, C-Met, CSF1R, CTNNB1, |
| | EGFR, ERBB2, ERBB4, FBXW7, FGFR1, FGFR2, FGFR3, FLT3, GNA11, GNAQ, GNAS, |
| | HNF1A, HRAS, IDH1, JAK2, JAK3, KDR, KRAS, MLH1, MPL, NOTCH1, NPM1, NRAS, |
| | PDGFRA, PIK3CA, PTEN, PTPN11, RB1, RET, SMAD4, SMARCB1, SMO, SRC, STK11, |
| | TP53, VHL |
| Mutated in cancers | ALK, BRAF, BRCA1, BRCA2, EGFR, ERRB2, GNA11, GNAQ, IDH1, IDH2, KIT, KRAS, |
| | MET, NRAS, PDGFRA, PIK3CA, PTEN, RET, SRC, TP53 |
| Mutated in cancers | AKT1, HRAS, GNAS, MEK1, MEK2, ERK1, ERK2, ERBB3, CDKN2A, PDGFRB, IFG1R, |
| | FGFR1, FGFR2, FGFR3, ERBB4, SMO, DDR2, GRB1, PTCH, SHH, PD1, UGT1A1, BIM, |
| | ESR1, MLL, AR, CDK4, SMAD4 |
| Mutated in cancers | ABL, APC, ATM, CDH1, CSFR1, CTNNB1, FBXW7, FLT3, HNF1A, JAK2, JAK3, KDR, |
| | MLH1, MPL, NOTCH1, NPM1, PTPN11, RB1, SMARCB1, STK11, VHL |
| Mutated in cancers | ABL1, AKT1, AKT2, AKT3, ALK, APC, AR, ARAF, ARFRP1, ARID1A, ARID2, ASXL1, |
| | ATM, ATR, ATRX, AURKA, AURKB, AXL, BAP1, BARD1, BCL2, BCL2L2, BCL6, |
| | BCOR, BCORL1, BLM, BRAF, BRCA1, BRCA2, BRIP1, BTK, CARD11, CBFB, CBL, |
| | CCND1, CCND2, CCND3, CCNE1, CD79A, CD79B, CDC73, CDH1, CDK12, CDK4, |
| | CDK6, CDK8, CDKN1B, CDKN2A, CDKN2B, CDKN2C, CEBPA, CHEK1, CHEK2, CIC, |
| | CREBBP, CRKL, CRLF2, CSF1R, CTCF, CTNNA1, CTNNB1, DAXX, DDR2, DNMT3A, |
| | DOT1L, EGFR, EMSY (C11orf30), EP300, EPHA3, EPHA5, EPHB1, ERBB2, ERBB3, |
| | ERBB4, ERG, ESR1, EZH2, FAM123B (WTX), FAM46C, FANCA, FANCC, FANCD2, |
| | FANCE, FANCF, FANCG, FANCL, FBXW7, FGF10, FGF14, FGF19, FGF23, FGF3, |
| | FGF4, FGF6, FGFR1, FGFR2, FGFR3, FGFR4, FLT1, FLT3, FLT4, FOXL2, GATA1, |
| | GATA2, GATA3, GID4 (C17orf39), GNA11, GNA13, GNAQ, GNAS, GPR124, GRIN2A, |
| | GSK3B, HGF, HRAS, IDH1, IDH2, IGF1R, IKBKE, IKZF1, IL7R, INHBA, IRF4, IRS2, |
| | JAK1, JAK2, JAK3, JUN, KAT6A (MYST3), KDM5A, KDM5C, KDM6A, KDR, KEAP1, |
| | KIT, KLHL6, KRAS, LRP1B, MAP2K1, MAP2K2, MAP2K4, MAP3K1, MCL1, MDM2, |
| | MDM4, MED12, MEF2B, MEN1, MET, MITF, MLH1, MLL, MLL2, MPL, MRE11A, |
| | MSH2, MSH6, MTOR, MUTYH, MYC, MYCL1, MYCN, MYD88, NF1, NF2, NFE2L2, |
| | NFKBIA, NKX2-1, NOTCH1, NOTCH2, NPM1, NRAS, NTRK1, NTRK2, NTRK3, |
| | NUP93, PAK3, PALB2, PAX5, PBRM1, PDGFRA, PDGFRB, PDK1, PIK3CA, PIK3CG, |
| | PIK3R1, PIK3R2, PPP2R1A, PRDM1, PRKAR1A, PRKDC, PTCH1, PTEN, PTPN11, |
| | RAD50, RAD51, RAF1, RARA, RB1, RET, RICTOR, RNF43, RPTOR, RUNX1, SETD2, |
| | SF3B1, SMAD2, SMAD4, SMARCA4, SMARCB1, SMO, SOCS1, SOX10, SOX2, SPEN, |
| | SPOP, SRC, STAG2, STAT4, STK11, SUFU, TET2, TGFBR2, TNFAIP3, TNFRSF14, |
| | TOP1, TP53, TSC1, TSC2, TSHR, VHL, WISP3, WT1, XPO1, ZNF217, ZNF703 |
| Gene rearrangement | ALK, BCR, BCL2, BRAF, EGFR, ETV1, ETV4, ETV5, ETV6, EWSR1, MLL, MYC, |
| in cancer | NTRK1, PDGFRA, RAF1, RARA, RET, ROS1, TMPRSS2 |
| Cancer Related | ABL1, ACE2, ADA, ADH1C, ADH4, AGT, AKT1, AKT2, AKT3, ALK, APC, AR, ARAF, |
| | AREG, ARFRP1, ARID1A, ARID2, ASNS, ASXL1, ATM, ATR, ATRX, AURKA, |
| | AURKB, AXL, BAP1, BARD1, BCL2, BCL2L2, BCL6, BCOR, BCORL1, BCR, BIRC5 |
| | (survivin), BLM, BRAF, BRCA1, BRCA2, BRIP1, BTK, CA2, CARD11, CAV, CBFB, |
| | CBL, CCND1, CCND2, CCND3, CCNE1, CD33, CD52 (CDW52), CD79A, CD79B, |
| | CDC73, CDH1, CDK12, CDK2, CDK4, CDK6, CDK8, CDKN1B, CDKN2A, CDKN2B, |
| | CDKN2C, CEBPA, CES2, CHEK1, CHEK2, CIC, CREBBP, CRKL, CRLF2, CSF1R, |
| | CTCF, CTNNA1, CTNNB1, DAXX, DCK, DDR2, DHFR, DNMT1, DNMT3A, DNMT3B, |
| | DOT1L, EGFR, EMSY (C11orf30), EP300, EPHA2, EPHA3, EPHA5, EPHB1, ERBB2, |
| | ERBB3, ERBB4, ERBR2 (typo?), ERCC3, EREG, ERG, ESR1, ETV1, ETV4, ETV5, ETV6, |
| | EWSR1, EZH2, FAM123B (WTX), FAM46C, FANCA, FANCC, FANCD2, FANCE, |
| | FANCF, FANCG, FANCL, FBXW7, FGF10, FGF14, FGF19, FGF23, FGF3, FGF4, FGF6, |
| | FGFR1, FGFR2, FGFR3, FGFR4, FLT1, FLT3, FLT4, FOLR1, FOLR2, FOXL2, FSHB, |
| | FSHPRH1, FSHR, GART, GATA1, GATA2, GATA3, GID4 (C17orf39), GNA11, GNA13, |
| | GNAQ, GNAS, GNRH1, GNRHR1, GPR124, GRIN2A, GSK3B, GSTP1, HDAC1, HGF, |
| | HIG1, HNF1A, HRAS, HSPCA (HSP90), IDH1, IDH2, IGF1R, IKBKE, IKZF1, IL13RA1, |
| | IL2, IL2RA (CD25), IL7R, INHBA, IRF4, IRS2, JAK1, JAK2, JAK3, JUN, KAT6A |
| | (MYST3), KDM5A, KDM5C, KDM6A, KDR (VEGFR2), KEAP1, KIT, KLHL6, KRAS, |
| | LCK, LRP1B, LTB, LTBR, MAP2K1, MAP2K2, MAP2K4, MAP3K1, MAPK, MCL1, |
| | MDM2, MDM4, MED12, MEF2B, MEN1, MET, MGMT, MITF, MLH1, MLL, MLL2, |
| | MPL, MRE11A, MS4A1 (CD20), MSH2, MSH6, MTAP, MTOR, MUTYH, MYC, MYCL1, |
| | MYCN, MYD88, NF1, NF2, NFE2L2, NFKB1, NFKB2, NFKBIA, NGF, NKX2-1, |
| | NOTCH1, NOTCH2, NPM1, NRAS, NTRK1, NTRK2, NTRK3, NUP93, ODC1, OGFR, |
| | PAK3, PALB2, PAX5, PBRM1, PDGFC, PDGFRA, PDGFRB, PDK1, PGP, PGR (PR), |
| | PIK3CA, PIK3CG, PIK3R1, PIK3R2, POLA, PPARG, PPARGC1, PPP2R1A, PRDM1, |
| | PRKAR1A, PRKDC, PTCH1, PTEN, PTPN11, RAD50, RAD51, RAF1, RARA, RB1, RET, |
| | RICTOR, RNF43, ROS1, RPTOR, RRM1, RRM2, RRM2B, RUNX1, RXR, RXRB, RXRG, |
| | SETD2, SF3B1, SMAD2, SMAD4, SMARCA4, SMARCB1, SMO, SOCS1, SOX10, SOX2, |
| | SPARC, SPEN, SPOP, SRC, SST, SSTR1, SSTR2, SSTR3, SSTR4, SSTR5, STAG2, |
| | STAT4, STK11, SUFU, TET2, TGFBR2, TK1, TLE3, TMPRSS2, TNF, TNFAIP3, |
| | TNFRSF14, TOP1, TOP2, TOP2A, TOP2B, TP53, TS, TSC1, TSC2, TSHR, TUBB3, TXN, |
| | TYMP, VDR, VEGF (VEGFA), VEGFC, VHL, WISP3, WT1, XDH, XPO1, YES1, ZAP70, |
| | ZNF217, ZNF703 |
| Cancer Related | 5T4, ABI1, ABL1, ABL2, ACKR3, ACSL3, ACSL6, ACVR1B, ACVR2A, AFF1, AFF3, |
| | AFF4, AKAP9, AKT1, AKT2, AKT3, ALDH2, ALK, AMER1, ANG1/ANGPT1/TM7SF2, |
| | ANG2/ANGPT2/VPS51, APC, AR, ARAF, ARFRP1, ARHGAP26, ARHGEF12, ARID1A, |
| | ARID1B, ARID2, ARNT, ASPSCR1, ASXL1, ATF1, ATIC, ATM, ATP1A1, ATP2B3, |
| | ATR, ATRX, AURKA, AURKB, AXIN1, AXL, BAP1, BARD1, BBC3, BCL10, BCL11A, |
| | BCL11B, BCL2, BCL2L1, BCL2L11, BCL2L2, BCL3, BCL6, BCL7A, BCL9, BCOR, |
| | BCORL1, BCR, BIRC3, BLM, BMPR1A, BRAF, BRCA1, BRCA2, BRD3, BRD4, BRIP1, |
| | BTG1, BTK, BUB1B, c-KIT, C11orf30, c15orf21, C15orf65, C2orf44, CA6, CACNA1D, |
| | CALR, CAMTA1, CANT1, CARD11, CARS, CASC5, CASP8, CBFA2T3, CBFB, CBL, |
| | CBLB, CBLC, CCDC6, CCNB1IP1, CCND1, CCND2, CCND3, CCNE1, CD110, CD123, |
| | CD137, CD19, CD20, CD274, CD27L, CD38, CD4, CD74, CD79A, CD79B, CDC73, |
| | CDH1, CDH11, CDK12, CDK4, CDK6, CDK7, CDK8, CDK9, CDKN1A, CDKN1B, |
| | CDKN2A, CDKN2B, CDKN2C, CDX2, CEBPA, CHCHD7, CHD2, CHD4, CHEK1, |
| | CHEK2, CHIC2, Chk1, CHN1, CIC, CIITA, CLP1, CLTC, CLTCL1, CNBP, CNOT3, |
| | CNTRL, COL1A1, COPB1, CoREST, COX6C, CRAF, CREB1, CREB3L1, CREB3L2, |
| | CREBBP, CRKL, CRLF2, CRTC1, CRTC3, CSF1R, CSF3R, CTCF, CTLA4, CTNNA1, |
| | CTNNB1, CUL3, CXCR4, CYLD, CYP17A1, CYP2D6, DAXX, DDB2, DDIT3, DDR1, |
| | DDR2, DDX10, DDX5, DDX6, DEK, DICER1, DLL-4, DNAPK, DNM2, DNMT3A, |
| | DOT1L, EBF1, ECT2L, EGFR, EIF4A2, ELF4, ELK4, ELL, ELN, EML4, EP300, EPHA3, |
| | EPHA5, EPHA7, EPHA8, EPHB1, EPHB2, EPS15, ERBB2, ERBB3, ERBB4, ERC1, |
| | ERCC1, ERCC2, ERCC3, ERCC4, ERCC5, ERG, ERRFI1, ESR1, ETBR, ETV1, ETV4, |
| | ETV5, ETV6, EWSR1, EXT1, EXT2, EZH2, EZR, FAK, FAM46C, FANCA, FANCC, |
| | FANCD2, FANCE, FANCF, FANCG, FANCL, FAS, FAT1, FBXO11, FBXW7, FCRL4, |
| | FEV, FGF10, FGF14, FGF19, FGF2, FGF23, FGF3, FGF4, FGF6, FGFR1, FGFR1OP, |
| | FGFR2, FGFR3, FGFR4, FH, FHIT, FIP1L1, FKBP12, FLCN, FLI1, FLT1, FLT3, FLT4, |
| | FNBP1, FOXA1, FOXL2, FOXO1, FOXO3, FOXO4, FOXP1, FRS2, FSTL3, FUBP1, FUS, |
| | GABRA6, GAS7, GATA1, GATA2, GATA3, GATA4, GATA6, GID4, GITR, GUI1, GMPS, |
| | GNA11, GNA13, GNAQ, GNAS, GNRH1, GOLGA5, GOPC, GPC3, GPHN, GPR124, |
| | GRIN2A, GRM3, GSK3B, GUCY2C, H3F3A, H3F3B, HCK, HERPUD1, HEY1, HGF, |
| | HIP1, HIST1H3B, HIST1H4I, HLF, HMGA1, HMGA2, HMT, HNF1A, HNRNPA2B1, |
| | HOOK3, HOXA11, HOXA13, HOXA9, HOXC11, HOXC13, HOXD11, HOXD13, HRAS, |
| | HSD3B1, HSP90AA1, HSP90AB1, IAP, IDH1, IDH2, IGF1R, IGF2, IKBKE, IKZF1, IL2, |
| | IL21R, IL6, IL6ST, IL7R, INHBA, INPP4B, IRF2, IRF4, IRS2, ITGAV, ITGB1, ITK, JAK1, |
| | JAK2, JAK3, JAZF1, JUN, KAT6A, KAT6B, KCNJ5, KDM5A, KDM5C, KDM6A, KDR, |
| | KDSR, KEAP1, KEL, KIAA1549, KIF5B, KIR3DL1, KLF4, KLHL6, KLK2, KMT2A, |
| | KMT2C, KMT2D, KRAS, KTN1, LASP1, LCK, LCP1, LGALS3, LGR5, LHFP, LIFR, |
| | LMO1, LMO2, LOXL2, LPP, LRIG3, LRP1B, LSD1, LYL1, LYN, LZTR1, MAF, MAFB, |
| | MAGI2, MALT1, MAML2, MAP2K1, MAP2K2, MAP2K4, MAP3K1, MAPK1, MAPK11, |
| | MAX, MCL1, MDM2, MDM4, MDS2, MECOM, MED12, MEF2B, MEK1, MEK2, MEN1, |
| | MET, MITF, MKL1, MLF1, MLH1, MLLT1, MLLT10, MLLT11, MLLT3, MLLT4, |
| | MLLT6, MMP9, MN1, MNX1, MPL, MPS1, MRE11A, MS4A1, MSH2, MSH6, MSI2, |
| | MSN, MST1R, MTCP1, MTOR, MUC1, MUC16, MUTYH, MYB, MYC, MYCL, MYCN, |
| | MYD88, MYH11, MYH9, NACA, NAE1, NBN, NCKIPSD, NCOA1, NCOA2, NCOA4, |
| | NDRG1, NF1, NF2, NFE2L2, NFIB, NFKB2, NFKBIA, NIN, NKX2-1, NONO, NOTCH1, |
| | NOTCH2, NOTCH3, NPM1, NR4A3, NRAS, NSD1, NT5C2, NTRK1, NTRK2, NTRK3, |
| | NUMA1, NUP214, NUP93, NUP98, NUTM1, NUTM2B, OLIG2, OMD, P2RY8, |
| | PAFAH1B2, PAK3, PALB2, PARK2, PARP1, PATZ1, PAX3, PAX5, PAX7, PAX8, |
| | PBRM1, PBX1, PCM1, PCSK7, PDCD1, PDCD1LG2, PDE4DIP, PDGFB, PDGFRA, |
| | PDGFRB, PDK1, PER1, PHF6, PHOX2B, PICALM, PIK3C2B, PIK3CA, PIK3CB, |
| | PIK3CD, PIK3CG, PIK3R1, PIK3R2, PIM1, PKC, PLAG1, PLCG2, PML, PMS1, PMS2, |
| | POLD1, POLE, POT1, POU2AF1, POU5F1, PPARG, PPP2R1A, PRCC, PRDM1, PRDM16, |
| | PREX2, PRF1, PRKAR1A, PRKCI, PRKDC, PRLR, PRRX1, PRSS8, PSIP1, PTCH1, |
| | PTEN, PTK2, PTPN11, PTPRC, PTPRD, QKI, RABEP1, RAC1, RAD21, RAD50, RAD51, |
| | RAD51B, RAF1, RALGDS, RANBP17, RANBP2, RANKL, RAP1GDS1, RARA, RB1, |
| | RBM10, RBM15, RECQL4, REL, RET, RHOH, RICTOR, RMI2, RNF213, RNF43, ROS1, |
| | RPL10, RPL20, RPL5, RPN1, RPS6KB1, RPTOR, RUNX1, RUNx1T1, SBDS, SDC4, |
| | SDHA, SDHAF2, SDHB, SDHC, SDHD, SEPT5, SEPT6, SEPT9, SET, SETBP1, SETD2, |
| | SF3B1, SFPQ, SH2B3, SH3GL1, SLAMF7, SLC34A2, SLC45A3, SLIT2, SMAD2, |
| | SMAD3, SMAD4, SMARCA4, SMARCB1, SMARCE1, SMO, SNCAIP, SNX29, SOCS1, |
| | SOX10, SOX2, SOX9, SPECC1, SPEN, SPOP, SPTA1, SRC, SRGAP3, SRSF2, SRSF3, |
| | SS18, SS18L1, SSX1, SSX2, SSX4, STAG2, STAT3, STAT4, STAT5B, STEAP1, STIL, |
| | STK11, SUFU, SUZ12, SYK, TAF1, TAF15, TAL1, TAL2, TBL1XR1, TBX3, TCEA1, |
| | TCF12, TCF3, TCF7L2, TCL1A, TERC, TERT, TET1, TET2, TFE3, TFEB, TFG, TFPT, |
| | TFRC, TGFB1, TGFBR2, THRAP3, TIE2, TLX1, TLX3, TMPRSS2, TNFAIP3, |
| | TNFRSF14, TNFRSF17, TOP1, TOP2A, TP53, TPM3, TPM4, TPR, TRAF7, TRIM26, |
| | TRIM27, TRIM33, TRIP11, TRRAP, TSC1, TSC2, TSHR, TTL, U2AF1, UBA1, UBR5, |
| | USP6, VEGFA, VEGFB, VEGFR, VHL, VTI1A, WAS, WEE1, WHSC1, WHSC1L1, WIF1, |
| | WISP3, WNT11, WNT2B, WNT3, WNT3A, WNT4, WNT5A, WNT6, WNT7B, WRN, |
| | WT1, WWTR1, XPA, XPC, XPO1, YWHAE, ZAK, ZBTB16, ZBTB2, ZMYM2, ZNF217, |
| | ZNF331, ZNF384, ZNF521, ZNF703, ZRSR2 |
| Cancer Related | ABL2, ACSL3, ACSL6, AFF1, AFF3, AFF4, AKAP9, AKT3, ALDH2, APC, ARFRP1, |
| | ARHGAP26, ARHGEF12, ARID2, ARNT, ASPSCR1, ASXL1, ATF1, ATIC, ATM, |
| | ATP1A1, ATR, AURKA, AXIN1, AXL, BAP1, BARD1, BCL10, BCL11A, BCL2L11, |
| | BCL3, BCL6, BCL7A, BCL9, BCR, BIRC3, BLM, BMPR1A, BRAF, BRCA1, BRCA2, |
| | BRIP1, BUB1B, C11orf30, C2orf44, CACNA1D, CALR, CAMTA1, CANT1, CARD11, |
| | CARS, CASC5, CASP8, CBFA2T3, CBFB, CBL, CBLB, CCDC6, CCNB1IP1, CCND2, |
| | CD274, CD74, CD79A, CDC73, CDH11, CDKN1B, CDX2, CHEK1, CHEK2, CHIC2, |
| | CHN1, CIC, CIITA, CLP1, CLTC, CLTCL1, CNBP, CNTRL, COPB1, CREB1, CREB3L1, |
| | CREB3L2, CRTC1, CRTC3, CSF1R, CSF3R, CTCF, CTLA4, CTNNA1, CTNNB1, CYLD, |
| | CYP2D6, DAXX, DDR2, DDX10, DDX5, DDX6, DEK, DICER1, DOT1L, EBF1, ECT2L, |
| | ELK4, ELL, EML4, EPHA3, EPHA5, EPHB1, EPS15, ERBB3, ERBB4, ERC1, ERCC2, |
| | ERCC3, ERCC4, ERCC5, ERG, ESR1, ETV1, ETV5, ETV6, EWSR1, EXT1, EXT2, EZR, |
| | FANCA, FANCC, FANCD2, FANCE, FANCG, FANCL, FAS, FBXO11, FBXW7, FCRL4, |
| | FGF14, FGF19, FGF23, FGF6, FGFR1OP, FGFR4, FH, FHIT, FIP1L1, FLCN, FLI1, FLT1, |
| | FLT3, FLT4, FNBP1, FOXA1, FOXO1, FOXP1, FUBP1, FUS, GAS7, GID4, GMPS, |
| | GNA13, GNAQ, GNAS, GOLGA5, GOPC, GPHN, GPR124, GRIN2A, GSK3B, H3F3A, |
| | H3F3B, HERPUD1, HGF, HIP1, HMGA1, HMGA2, HNRNPA2B1, HOOK3, HSP90AA1, |
| | HSP90AB1, IDH1, IDH2, IGF1R, IKZF1, IL2, IL21R, IL6ST, IL7R, IRF4, ITK, JAK1, |
| | JAK2, JAK3, JAZF1, KDM5A, KEAP1, KIAA1549, KIF5B, KIT, KLHL6, KMT2A, |
| | KMT2C, KMT2D, KRAS, KTN1, LCK, LCP1, LGR5, LHFP, LIFR, LPP, LRIG3, LRP1B, |
| | LYL1, MAF, MALT1, MAML2, MAP2K2, MAP2K4, MAP3K1, MDM4, MDS2, MEF2B, |
| | MEN1, MITF, MLF1, MLH1, MLLT1, MLLT10, MLLT3, MLLT4, MLLT6, MNX1, |
| | MRE11A, MSH2, MSH6, MSI2, MTOR, MYB, MYCN, MYD88, MYH11, MYH9, NACA, |
| | NCKIPSD, NCOA1, NCOA2, NCOA4, NF1, NFE2L2, NFIB, NFKB2, NIN, NOTCH2, |
| | NPM1, NR4A3, NSD1, NT5C2, NTRK2, NTRK3, NUP214, NUP93, NUP98, NUTM1, |
| | PALB2, PAX3, PAX5, PAX7, PBRM1, PBX1, PCM1, PCSK7, PDCD1, PDCD1LG2, |
| | PDGFB, PDGFRA, PDGFRB, PDK1, PER1, PICALM, PIK3CA, PIK3R1, PIK3R2, PIM1, |
| | PML, PMS2, POLE, POT1, POU2AF1, PPARG, PRCC, PRDM1, PRDM16, PRKAR1A, |
| | PRRX1, PSIP1, PTCH1, PTEN, PTPN11, PTPRC, RABEP1, RAC1, RAD50, RAD51, |
| | RAD51B, RAF1, RALGDS, RANBP17, RAP1GDS1, RARA, RBM15, REL, RET, RMI2, |
| | RNF43, RPL22, RPL5, RPN1, RPTOR, RUNX1, RUNX1T1, SBDS, SDC4, SDHAF2, |
| | SDHB, SDHC, SDHD, 8-Sep, SET, SETBP1, SETD2, SF3B1, SH2B3, SH3GL1, SLC34A2, |
| | SMAD2, SMAD4, SMARCB1, SMARCE1, SMO, SNX29, SOX10, SPECC1, SPEN, |
| | SRGAP3, SRSF2, SRSF3, SS18, SS18L1, STAT3, STAT4, STAT5B, STIL, STK11, SUFU, |
| | SUZ12, SYK, TAF15, TCF12, TCF3, TCF7L2, TET1, TET2, TFEB, TFG, TFRC, TGFBR2, |
| | TLX1, TNFAIP3, TNFRSF14, TNFRSF17, TP53, TPM3, TPM4, TPR, TRAF7, TRIM26, |
| | TRIM27, TRIM33, TRIP11, TRRAP, TSC1, TSC2, TSHR, TTL, U2AF1, USP6, VEGFA, |
| | VEGFB, VTI1A, WHSC1, WHSC1L1, WIF1, WISP3, WRN, WWTR1, XPA, XPC, XPO1, |
| | YWHAE, ZMYM2, ZNF217, ZNF331, ZNF384, ZNF521, ZNF703 |
| Gene fusions and | AKT3, ALK, ARHGAP26, AXL, BRAF, BRD3/4, EGFR, ERG, ESR1, ETV1/4/5/6, |
| mutations in cancer | EWSR1, FGFR1, FGFR2, FGFR3, FGR, INSR, MAML2, MAST1/2, MET, MSMB, MUSK, |
| | MYB, NOTCH1/2, NRG1, NTRK1/2/3, NUMBL, NUTM1, PDGFRA/B, PIK3CA, PKN1, |
| | PPARG, PRKCA/B, RAF1, RELA, RET, ROS1, RSPO2/3, TERT, TFE3, TFEB, THADA, |
| | TMPRSS2 |
| Gene fusions and | ABL1 fusion to (ETV6, NUP214, RCSD1, RANBP2, SNX2, or ZMIZ1); ABL2 fusion to |
| mutations in cancer | (PAG1 or RCSD1); CSF1R fusion to (SSBP2); PDGFRB fusion to (EBF1, SSBP2, |
| | TNIP1 or ZEB2); CRLF2 fusion to (P2RY8); JAK2 fusion to (ATF7IP, BCR, ETV6, |
| | PAX5, PPFIBP1, SSBP2, STRN3, TERP2, or TPR); EPOR fusion to (IGH or IGK); |
| | IL2RB fusion to (MYH9); NTRK3 fusion to (ETV6); PTK2B fusion to (KDM6A or |
| | STAG2); TSLP fusion to (IQGAP2); TYK2 fusion to (MYB) |
| Cytohesions | cytohesin-1 (CYTH1), cytohesin-2 (CYTH2; ARNO), cytohesin-3 (CYTH3; Grp1; ARNO3), |
| | cytohesin-4 (CYTH4) |
| Cancer/Angio | Erb 2, Erb 3, Erb 4, UNC93a, B7H3, MUC1, MUC2, MUC16, MUC17, 5T4, RAGE, VEGF |
| | A, VEGFR2, FLT1, DLL4, Epcam |
| Tissue (Breast) | BIG H3, GCDFP-15, PR(B), GPR 30, CYFRA 21, BRCA 1, BRCA 2, ESR 1, ESR2 |
| Tissue (Prostate) | PSMA, PCSA, PSCA, PSA, TMPRSS2 |
| Inflammation/Immune | MFG-E8, IFNAR, CD40, CD80, MICB, HLA-DRb, IL-17-Ra |
| Common vesicle | HSPA8, CD63, Actb, GAPDH, CD9, CD81, ANXA2, HSP90AA1, ENO1, YWHAZ, |
| markers | PDCD6IP, CFL1, SDCBP, PKN2, MSN, MFGE8, EZR, YWHAG, PGK1, EEF1A1, PPIA, |
| | GLC1F, GK, ANXA6, ANXA1, ALDOA, ACTG1, TPI1, LAMP2, HSP90AB1, DPP4, |
| | YWHAB, TSG101, PFN1, LDHB, HSPA1B, HSPA1A, GSTP1, GNAI2, GDI2, CLTC, |
| | ANXA5, YWHAQ, TUBA1A, THBS1, PRDX1, LDHA, LAMP1, CLU, CD86 |
| Common vesicle | CD63, GAPDH, CD9, CD81, ANXA2, ENO1, SDCBP, MSN, MFGE8, EZR, GK, ANXA1, |
| membrane markers | LAMP2, DPP4, TSG101, HSPA1A, GDI2, CLTC, LAMP1, CD86, ANPEP, TFRC, |
| | SLC3A2, RDX, RAP1B, RAB5C, RAB5B, MYH9, ICAM1, FN1, RAB11B, PIGR, |
| | LGALS3, ITGB1, EHD1, CLIC1, ATP1A1, ARF1, RAP1A, P4HB, MUC1, KRT10, HLA- |
| | A, FLOT1, CD59, C1orf58, BASP1, TACSTD1, STOM |
| Common vesicle | MHC class I, MHC class II, Integrins, Alpha 4 beta 1, Alpha M beta 2, Beta 2, |
| markers | ICAM1/CD54, P-selection, Dipeptidylpeptidase IV/CD26, Aminopeptidase n/CD13, CD151, |
| | CD53, CD37, CD82, CD81, CD9, CD63, Hsp70, Hsp84/90 |
| | Actin, Actin-binding proteins, Tubulin, Annexin I, Annexin II, Annexin IV, Annexin V, |
| | Annexin VI, RAB7/RAP1B/RADGDI, Gi2alpha/14-3-3, CBL/LCK, CD63, GAPDH, CD9, |
| | CD81, ANXA2, ENO1, SDCBP, MSN, MFGE8, EZR, GK, ANXA1, LAMP2, DPP4, |
| | TSG101, HSPA1A, GDI2, CLTC, LAMP1, Cd86, ANPEP, TFRC, SLC3A2, RDX, RAP1B, |
| | RAB5C, RAB5B, MYH9, ICAM1, FN1, RAB11B, PIGR, LGALS3, ITGB1, EHD1, CLIC1, |
| | ATP1A1, ARF1, RAP1A, P4HB, MUC1, KRT10, HLA-A, FLOT1, CD59, C1orf58, BASP1, |
| | TACSTD1, STOM |
| Vesicle markers | A33, a33 n15, AFP, ALA, ALIX, ALP, AnnexinV, APC, ASCA, ASPH (246-260), ASPH |
| | (666-680), ASPH (A-10), ASPH (D01P), ASPH (D03), ASPH (G-20), ASPH (H-300), |
| | AURKA, AURKB, B7H3, B7H4, BCA-225, BCNP, BDNF, BRCA, CA125 (MUC16), CA- |
| | 19-9, C-Bir, CD1.1, CD10, CD174 (Lewis y), CD24, CD44, CD46, CD59 (MEM-43), CD63, |
| | CD66e CEA, CD73, CD81, CD9, CDA, CDAC1 1a2, CEA, C-Erb2, C-erbB2, CRMP-2, |
| | CRP, CXCL12, CYFRA21-1, DLL4, DR3, EGFR, Epcam, EphA2, EphA2 (H-77), ER, |
| | ErbB4, EZH2, FASL, FRT, FRT c.f23, GDF15, GPCR, GPR30, Gro-alpha, HAP, HBD 1, |
| | HBD2, HER 3 (ErbB3), HSP, HSP70, hVEGFR2, iC3b, IL 6 Unc, IL-1B, IL6 Unc, IL6R, |
| | IL8, IL-8, INSIG-2, KLK2, L1CAM, LAMN, LDH, MACC-1, MAPK4, MART-1, MCP-1, |
| | M-CSF, MFG-E8, MIC1, MIF, MIS RII, MMG, MMP26, MMP7, MMP9, MS4A1, MUC1, |
| | MUC1 seq1, MUC1 seq11A, MUC17, MUC2, Ncam, NGAL, NPGP/NPFF2, OPG, OPN, |
| | p53, p53, PA2G4, PBP, PCSA, PDGFRB, PGP9.5, PIM1, PR (B), PRL, PSA, PSMA, |
| | PSME3, PTEN, R5-CD9 Tube 1, Reg IV, RUNX2, SCRN1, seprase, SERPINB3, SPARC, |
| | SPB, SPDEF, SRVN, STAT 3, STEAP1, TF (FL-295), TFF3, TGM2, TIMP-1, TIMP1, |
| | TIMP2, TMEM211, TMPRSS2, TNF-alpha, Trail-R2, Trail-R4, TrKB, TROP2, Tsg 101, |
| | TWEAK, UNC93A, VEGF A, YPSMA-1 |
| Vesicle markers | NSE, TRIM29, CD63, CD151, ASPH, LAMP2, TSPAN1, SNAIL, CD45, CKS1, NSE, |
| | FSHR, OPN, FTH1, PGP9, ANNEXIN 1, SPD, CD81, EPCAM, PTH1R, CEA, CYTO 7, |
| | CCL2, SPA, KRAS, TWIST1, AURKB, MMP9, P27, MMP1, HLA, HIF, CEACAM, |
| | CENPH, BTUB, INTG b4, EGFR, NACC1, CYTO 18, NAP2, CYTO 19, ANNEXIN V, |
| | TGM2, ERB2, BRCA1, B7H3, SFTPC, PNT, NCAM, MS4A1, P53, INGA3, MUC2, SPA, |
| | OPN, CD63, CD9, MUC1, UNCR3, PAN ADH, HCG, TIMP, PSMA, GPCR, RACK1, |
| | PSCA, VEGF, BMP2, CD81, CRP, PRO GRP, B7H3, MUC1, M2PK, CD9, PCSA, PSMA |
| Vesicle markers | TFF3, MS4A1, EphA2, GAL3, EGFR, N-gal, PCSA, CD63, MUC1, TGM2, CD81, DR3, |
| | MACC-1, TrKB, CD24, TIMP-1, A33, CD66 CEA, PRL, MMP9, MMP7, TMEM211, |
| | SCRN1, TROP2, TWEAK, CDACC1, UNC93A, APC, C-Erb, CD10, BDNF, FRT, GPR30, |
| | P53, SPR, OPN, MUC2, GRO-1, tsg 101, GDF15 |
| Vesicle markers | CD9, Erb2, Erb4, CD81, Erb3, MUC16, CD63, DLL4, HLA-Drpe, B7H3, IFNAR, 5T4, |
| | PCSA, MICE, PSMA, MFG-E8, Muc1, PSA, Muc2, Unc93a, VEGFR2, EpCAM, VEGF A, |
| | TMPRSS2, RAGE, PSCA, CD40, Muc17, IL-17-RA, CD80 |
| Benign Prostate | BCMA, CEACAM-1, HVEM, IL-1 R4, IL-10 Rb, Trappin-2, p53, hsa-miR-329, hsa-miR- |
| Hyperplasia (BPH) | 30a, hsa-miR-335, hsa-miR-152, hsa-miR-151-5p, hsa-miR-200a, hsa-miR-145, hsa-miR- |
| | 29a, hsa-miR-106b, hsa-miR-595, hsa-miR-142-5p, hsa-miR-99a, hsa-miR-20b, hsa-miR- |
| | 373, hsa-miR-502-5p, hsa-miR-29b, hsa-miR-142-3p, hsa-miR-663, hsa-miR-423-5p, hsa- |
| | miR-15a, hsa-miR-888, hsa-miR-361-3p, hsa-miR-365, hsa-miR-10b, hsa-miR-199a-3p, hsa- |
| | miR-181a, hsa-miR-19a, hsa-miR-125b, hsa-miR-760, hsa-miR-7a, hsa-miR-671-5p, hsa- |
| | miR-7c, hsa-miR-1979, hsa-miR-103 |
| Metastatic Prostate | hsa-miR-100, hsa-miR-1236, hsa-miR-1296, hsa-miR-141, hsa-miR-146b-5p, hsa-miR-17*, |
| Cancer | hsa-miR-181a, hsa-miR-200b, hsa-miR-20a*, hsa-miR-23a*, hsa-miR-331-3p, hsa-miR-375, |
| | hsa-miR-452, hsa-miR-572, hsa-miR-574-3p, hsa-miR-577, hsa-miR-582-3p, hsa-miR-937, |
| | miR-10a, miR-134, miR-141, miR-200b, miR-30a, miR-32, miR-375, miR-495, miR-564, |
| | miR-570, miR-574-3p, miR-885-3p |
| Metastatic Prostate | hsa-miR-200b, hsa-miR-375, hsa-miR-141, hsa-miR-331-3p, hsa-miR-181a, hsa-miR-574-3p |
| Cancer | |
| Prostate Cancer | hsa-miR-574-3p, hsa-miR-141, hsa-miR-432, hsa-miR-326, hsa-miR-2110, hsa-miR-181a- |
| | 2*, hsa-miR-107, hsa-miR-301a, hsa-miR-484, hsa-miR-625* |
| Metastatic Prostate | hsa-miR-582-3p, hsa-miR-20a*, hsa-miR-375, hsa-miR-200b, hsa-miR-379, hsa-miR-572, |
| Cancer | hsa-miR-513a-5p, hsa-miR-577, hsa-miR-23a*, hsa-miR-1236, hsa-miR-609, hsa-miR-17*, |
| | hsa-miR-130b, hsa-miR-619, hsa-miR-624*, hsa-miR-198 |
| Metastatic Prostate | FOX01A, SOX9, CLNS1A, PTGDS, XPO1, LETMD1, RAD23B, ABCC3, APC, CHES1, |
| Cancer | EDNRA, FRZB, HSPG2, TMPRSS2_ETV1 fusion |
| Prostate Cancer | hsa-let-7b, hsa-miR-107, hsa-miR-1205, hsa-miR-1270, hsa-miR-130b, hsa-miR-141, hsa- |
| | miR-143, hsa-miR-148b*, hsa-miR-150, hsa-miR-154*, hsa-miR-181a*, hsa-miR-181a-2*, |
| | hsa-miR-18a*, hsa-miR-19b-1*, hsa-miR-204, hsa-miR-2110, hsa-miR-215, hsa-miR-217, |
| | hsa-miR-219-2-3p, hsa-miR-23b*, hsa-miR-299-5p, hsa-miR-301a, hsa-miR-301a, hsa-miR- |
| | 326, hsa-miR-331-3p, hsa-miR-365*, hsa-miR-373*, hsa-miR-424, hsa-miR-424*, hsa-miR- |
| | 432, hsa-miR-450a, hsa-miR-451, hsa-miR-484, hsa-miR-497, hsa-miR-517*, hsa-miR-517a, |
| | hsa-miR-518f, hsa-miR-574-3p, hsa-miR-595, hsa-miR-617, hsa-miR-625*, hsa-miR-628-5p, |
| | hsa-miR-629, hsa-miR-634, hsa-miR-769-5p, hsa-miR-93, hsa-miR-96 |
| Prostate Cancer | CD9, PSMA, PCSA, CD63, CD81, B7H3, IL 6, OPG-13, IL6R, PA2G4, EZH2, RUNX2, |
| | SERPINB3, EpCam |
| Prostate Cancer | A33, a33 n15, AFP, ALA, ALIX, ALP, AnnexinV, APC, ASCA, ASPH (246-260), ASPH |
| | (666-680), ASPH (A-10), ASPH (D01P), ASPH (D03), ASPH (G-20), ASPH (H-300), |
| | AURKA, AURKB, B7H3, B7H4, BCA-225, BCNP, BDNF, BRCA, CA125 (MUC16), CA- |
| | 19-9, C-Bir, CD1.1, CD10, CD174 (Lewis y), CD24, CD44, CD46, CD59 (MEM-43), CD63, |
| | CD66e CEA, CD73, CD81, CD9, CDA, CDAC1 1a2, CEA, C-Erb2, C-erbB2, CRMP-2, |
| | CRP, CXCL12, CYFRA21-1, DLL4, DR3, EGFR, Epcam, EphA2, EphA2 (H-77), ER, |
| | ErbB4, EZH2, FASL, FRT, FRT c.f23, GDF15, GPCR, GPR30, Gro-alpha, HAP, HBD 1, |
| | HBD2, HER 3 (ErbB3), HSP, HSP70, hVEGFR2, iC3b, IL 6 Unc, IL-1B, IL6 Unc, IL6R, |
| | IL8, IL-8, INSIG-2, KLK2, L1CAM, LAMN, LDH, MACC-1, MAPK4, MART-1, MCP-1, |
| | M-CSF, MFG-E8, MIC1, MIF, MIS RII, MMG, MMP26, MMP7, MMP9, MS4A1, MUC1, |
| | MUC1 seq1, MUC1 seq11A, MUC17, MUC2, Ncam, NGAL, NPGP/NPFF2, OPG, OPN, |
| | p53, p53, PA2G4, PBP, PCSA, PDGFRB, PGP9.5, PIM1, PR (B), PRL, PSA, PSMA, |
| | PSME3, PTEN, R5-CD9 Tube 1, Reg IV, RUNX2, SCRN1, seprase, SERPINB3, SPARC, |
| | SPB, SPDEF, SRVN, STAT 3, STEAP1, TF (FL-295), TFF3, TGM2, TIMP-1, TIMP1, |
| | TIMP2, TMEM211, TMPRSS2, TNF-alpha, Trail-R2, Trail-R4, TrKB, TROP2, Tsg 101, |
| | TWEAK, UNC93A, VEGF A, YPSMA-1 |
| Prostate Cancer | 5T4, ACTG1, ADAM10, ADAM15, ALDOA, ANXA2, ANXA6, APOA1, ATP1A1, |
| Vesicle Markers | BASP1, C1orf58, C20orf114, C8B, CAPZA1, CAV1, CD151, CD2AP, CD59, CD9, CD9, |
| | CFL1, CFP, CHMP4B, CLTC, COTL1, CTNND1, CTSB, CTSZ, CYCS, DPP4, EEF1A1, |
| | EHD1, ENO1, F11R, F2, F5, FAM125A, FNBP1L, FOLH1, GAPDH, GLB1, GPX3, |
| | HIST1H1C, HIST1H2AB, HSP90AB1, HSPA1B, HSPA8, IGSF8, ITGB1, ITIH3, JUP, |
| | LDHA, LDHB, LUM, LYZ, MFGE8, MGAM, MMP9, MYH2, MYL6B, NME1, NME2, |
| | PABPC1, PABPC4, PACSIN2, PCBP2, PDCD6IP, PRDX2, PSA, PSMA, PSMA1, PSMA2, |
| | PSMA4, PSMA6, PSMA7, PSMB1, PSMB2, PSMB3, PSMB4, PSMB5, PSMB6, PSMB8, |
| | PTGFRN, RPS27A, SDCBP, SERINC5, SH3GL1, SLC3A2, SMPDL3B, SNX9, TACSTD1, |
| | TCN2, THBS1, TPI1, TSG101, TUBB, VDAC2, VPS37B, YWHAG, YWHAQ, YWHAZ |
| Prostate Cancer | FLNA, DCRN, HER 3 (ErbB3), VCAN, CD9, GAL3, CDADC1, GM-CSF, EGFR, RANK, |
| Vesicle Markers | CSA, PSMA, ChickenIgY, B7H3, PCSA, CD63, CD3, MUC1, TGM2, CD81, S100-A4, |
| | MFG-E8, Integrin, NK-2R(C-21), PSA, CD24, TIMP-1, IL6 Unc, PBP, PIM1, CA-19-9, |
| | Trail-R4, MMP9, PRL, EphA2, TWEAK, NY-ESO-1, Mammaglobin, UNC93A, A33, |
| | AURKB, CD41, XAGE-1, SPDEF, AMACR, seprase/FAP, NGAL, CXCL12, FRT, CD66e |
| | CEA, SIM2 (C-15), C-Bir, STEAP, PSIP1/LEDGF, MUC17, hVEGFR2, ERG, MUC2, |
| | ADAM10, ASPH (A-10), CA125, Gro-alpha, Tsg 101, SSX2, Trail-R4 |
| Prostate Cancer | NT5E (CD73), A33, ABL2, ADAM10, AFP, ALA, ALIX, ALPL, AMACR, Apo J/CLU, |
| Vesicle Markers | ASCA, ASPH (A-10), ASPH (D01P), AURKB, B7H3, B7H4, BCNP, BDNF, CA125 |
| | (MUC16), CA-19-9, C-Bir (Flagellin), CD10, CD151, CD24, CD3, CD41, CD44, CD46, |
| | CD59(MEM-43), CD63, CD66e CEA, CD81, CD9, CDA, CDADC1, C-erbB2, CRMP-2, |
| | CRP, CSA, CXCL12, CXCR3, CYFRA21-1, DCRN, DDX-1, DLL4, EGFR, EpCAM, |
| | EphA2, ERG, EZH2, FASL, FLNA, FRT, GAL3, GATA2, GM-CSF, Gro-alpha, HAP, |
| | HER3 (ErbB3), HSP70, HSPB1, hVEGFR2, iC3b, IL-1B, IL6 R, IL6 Unc, IL7 R |
| | alpha/CD127, IL8, INSIG-2, Integrin, KLK2, Label, LAMN, Mammaglobin, M-CSF, MFG- |
| | E8, MIF, MIS RII, MMP7, MMP9, MS4A1, MUC1, MUC17, MUC2, Ncam, NDUFB7, |
| | NGAL, NK-2R(C-21), NY-ESO-1, p53, PBP, PCSA, PDGFRB, PIM1, PRL, PSA, |
| | PSIP1/LEDGF, PSMA, RAGE, RANK, Reg IV, RUNX2, S100-A4, seprase/FAP, |
| | SERPINB3, SIM2 (C-15), SPARC, SPC, SPDEF, SPP1, SSX2, SSX4, STEAP, STEAP4, |
| | TFF3, TGM2, TIMP-1, TMEM211, Trail-R2, Trail-R4, TrKB (poly), Trop2, Tsg 101, |
| | TWEAK, UNC93A, VCAN, VEGF A, wnt-5a(C-16), XAGE, XAGE-1 |
| Prostate Vesicle | ADAM 9, ADAM10, AGR2, ALDOA, ALIX, ANXA1, ANXA2, ANXA4, ARF6, ATP1A3, |
| Membrane | B7H3, BCHE, BCL2L14 (Bcl G), BCNP1, BDKRB2, BDNFCAV1-Caveolin1, CCR2 (CC |
| | chemokine receptor 2, CD192), CCR5 (CC chemokine receptor 5), CCT2 (TCP1-beta), |
| | CD10, CD151, CD166/ALCAM, CD24, CD283/TLR3, CD41, CD46, CD49d (Integrin alpha |
| | 4, ITGA4), CD63, CD81, CD9, CD90/THY1, CDH1, CDH2, CDKN1A cyclin-dependent |
| | kinase inhibitor (p21), CGA gene (coding for the alpha subunit of glycoprotein hormones), |
| | CLDN3- Claudin3, COX2 (PTGS2), CSE1L (Cellular Apoptosis Susceptibility), CXCR3, |
| | Cytokeratin 18, Eag1 (KCNH1), EDIL3 (del-1), EDNRB—Endothelial Receptor Type B, |
| | EGFR, EpoR, EZH2 (enhancer of Zeste Homolog2), EZR, FABP5, |
| | Farnesyltransferase/geranylgeranyl diphosphate synthase 1 (GGPS1), Fatty acid synthase |
| | (FASN), FTL (light and heavy), GAL3, GDF15—Growth Differentiation Factor 15, GloI, GM- |
| | CSF, GSTP1, H3F3A, HGF (hepatocyte growth factor), hK2/Kif2a, HSP90AA1, HSPA1A/ |
| | HSP70-1, HSPB1, IGFBP-2, IGFBP-3, IL1alpha, IL-6, IQGAP1, ITGAL (Integrin alpha L |
| | chain), Ki67, KLK1, KLK10, KLK11, KLK12, KLK13, KLK14, KLK15, KLK4, KLK5, |
| | KLK6, KLK7, KLK8, KLK9, Lamp-2, LDH-A, LGALS3BP, LGALS8, MMP 1, MMP 2, |
| | MMP 25, MMP 3, MMP10, MMP-14/MT1-MMP, MMP7, MTA1nAnS, Nav1.7, NKX3-1, |
| | Notch1, NRP1/CD304, PAP (ACPP), PGP, PhIP, PIP3/BPNT1, PKM2, PKP1 |
| | (plakophilin1), PKP3 (plakophilin3), Plasma chromogranin-A (CgA), PRDX2, Prostate |
| | secretory protein (PSP94)/β-Microseminoprotein (MSP)/IGBF, PSAP, PSMA, PSMA1, |
| | PTENPTPN13/PTPL1, RPL19, seprase/FAPSET, SLC3A2/CD98, SRVN, STEAP1, |
| | Syndecan/CD138, TGFB, TGM2, TIMP-1TLR4 (CD284), TLR9 (CD289), TMPRSS1/ |
| | hepsin, TMPRSS2, TNFR1, TNFα, Transferrin receptor/CD71/TRFR, Trop2 (TACSTD2), |
| | TWEAK uPA (urokinase plasminoge activator) degrades extracellular matrix, uPAR (uPA |
| | receptor)/CD87, VEGFR1, VEGFR2 |
| Prostate Vesicle | ADAM 34, ADAM 9, AGR2, ALDOA, ANXA1, ANXA 11, ANXA4, ANXA 7, ANXA2, |
| Markers | ARF6, ATP1A1, ATP1A2, ATP1A3, BCHE, BCL2L14 (Bcl G), BDKRB2, CA215, |
| | CAV1—Caveolin1, CCR2 (CC chemokine receptor 2, CD192), CCR5 (CC chemokine receptor 5), |
| | CCT2 (TCP1-beta), CD166/ALCAM, CD49b (Integrin alpha 2, ITGA4), CD90/THY1, |
| | CDH1, CDH2, CDKN1A cyclin-dependent kinase inhibitor (p21), CGA gene (coding for the |
| | alpha subunit of glycoprotein hormones), CHMP4B, CLDN3—Claudin3, CLSTN1 |
| | (Calsyntenin-1), COX2 (PTGS2), CSE1L (Cellular Apoptosis Susceptibility), Cytokeratin 18, |
| | Eag1 (KCNH1) (plasma membrane-K+-voltage gated channel), EDIL3 (del-1), EDNRB- |
| | Endothelial Receptor Type B, Endoglin/CD105, ENOX2—Ecto-NOX disulphide Thiol |
| | exchanger 2, EPCA-2 Early prostate cancer antigen2, EpoR, EZH2 (enhancer of Zeste |
| | Homolog2), EZR, FABP5, Farnesyltransferase/geranylgeranyl diphosphate synthase 1 |
| | (GGPS1), Fatty acid synthase (FASN, plasma membrane protein), FTL (light and heavy), |
| | GDF15—Growth Differentiation Factor 15, GloI, GSTP1, H3F3A, HGF (hepatocyte growth |
| | factor), hK2 (KLK2), HSP90AA1, HSPA1A/HSP70-1, IGFBP-2, IGFBP-3, IL1alpha, IL-6, |
| | IQGAP1, ITGAL (Integrin alpha L chain), Ki67, KLK1, KLK10, KLK11, KLK12, KLK13, |
| | KLK14, KLK15, KLK4, KLK5, KLK6, KLK7, KLK8, KLK9, Lamp-2, LDH-A, |
| | LGALS3BP, LGALS8, MFAP5, MMP 1, MMP 2, MMP 24, MMP 25, MMP 3, MMP10, |
| | MMP-14/MT1-MMP, MTA1, nAnS, Nav1.7, NCAM2—Neural cell Adhesion molecule 2, |
| | NGEP/D-TMPP/IPCA-5/ANO7, NKX3-1, Notch1, NRP1/CD304, PGP, PAP (ACPP), |
| | PCA3—Prostate cancer antigen 3, Pdia3/ERp57, PhIP, phosphatidylethanolamine (PE), PIP3, |
| | PKP1 (plakophilin1), PKP3 (plakophilin3), Plasma chromogranin-A (CgA), PRDX2, Prostate |
| | secretory protein (PSP94)/β-Microseminoprotein (MSP)/IGBF, PSAP, PSMA1, PTEN, |
| | PTGFRN, PTPN13/PTPL1, PKM2, RPL19, SCA-1/ATXN1, SERINC5/TPO1, SET, |
| | SLC3A2/CD98, STEAP1, STEAP-3, SRVN, Syndecan/CD138, TGFB, Tissue Polypeptide |
| | Specific antigen TPS, TLR4 (CD284), TLR9 (CD289), TMPRSS1/hepsin, TMPRSS2, |
| | TNFR1, TNFα, CD283/TLR3, Transferrin receptor/CD71/TRFR, uPA (urokinase plasminoge |
| | activator), uPAR (uPA receptor)/CD87, VEGFR1, VEGFR2 |
| Prostate Cancer | hsa-miR-1974, hsa-miR-27b, hsa-miR-103, hsa-miR-146a, hsa-miR-22, hsa-miR-382, hsa- |
| Treatment | miR-23a, hsa-miR-376c, hsa-miR-335, hsa-miR-142-5p, hsa-miR-221, hsa-miR-142-3p, hsa- |
| | miR-151-3p, hsa-miR-21, hsa-miR-16 |
| Prostate Cancer | let-7d, miR-148a, miR-195, miR-25, miR-26b, miR-329, miR-376c, miR-574-3p, miR-888, |
| | miR-9, miR1204, miR-16-2*, miR-497, miR-588, miR-614, miR-765, miR92b*, miR-938, |
| | let-7f-2*, miR-300, miR-523, miR-525-5p, miR-1182, miR-1244, miR-520d-3p, miR-379, |
| | let-7b, miR-125a-3p, miR-1296, miR-134, miR-149, miR-150, miR-187, miR-32, miR-324- |
| | 3p, miR-324-5p, miR-342-3p, miR-378, miR-378*, miR-384, miR-451, miR-455-3p, miR- |
| | 485-3p, miR-487a, miR-490-3p, miR-502-5p, miR-548a-5p, miR-550, miR-562, miR-593, |
| | miR-593*, miR-595, miR-602, miR-603, miR-654-5p, miR-877*, miR-886-5p, miR-125a-5p, |
| | miR-140-3p, miR-192, miR-196a, miR-2110, miR-212, miR-222, miR-224*, miR-30b*, |
| | miR-499-3p, miR-505* |
| Prostate (PCSA + | miR-182, miR-663, miR-155, mirR-125a-5p, miR-548a-5p, miR-628-5p, miR-517*, miR- |
| cMVs) | 450a, miR-920, hsa-miR-619, miR-1913, miR-224*, miR-502-5p, miR-888, miR-376a, miR- |
| | 542-5p, miR-30b*, miR-1179 |
| Prostate Cancer | miR-183-96-182 cluster (miRs-183, 96 and 182), metal ion transporter such as hZIP1, |
| | SLC39A1, SLC39A2, SLC39A3, SLC39A4, SLC39A5, SLC39A6, SLC39A7, SLC39A8, |
| | SLC39A9, SLC39A10, SLC39A11, SLC39A12, SLC39A13, SLC39A14 |
| Prostate Cancer | RAD23B, FBP1, TNFRSF1A, CCNG2, NOTCH3, ETV1, BID, SIM2, LETMD1, ANXA1, |
| | miR-519d,miR-647 |
| Prostate Cancer | RAD23B, FBP1, TNFRSF1A, NOTCH3, ETV1, BID, SIM2, ANXA1, BCL2 |
| Prostate Cancer | ANPEP, ABL1, PSCA, EFNA1, HSPB1, INMT, TRIP13 |
| Prostate Cancer | E2F3, c-met, pRB, EZH2, e-cad, CAXII, CAIX, HIF-1α, Jagged, PIM-1, hepsin, RECK, |
| | Clusterin, MMP9, MTSP-1, MMP24, MMP15, IGFBP-2, IGFBP-3, E2F4, caveolin, EF-1A, |
| | Kallikrein 2, Kallikrein 3, PSGR |
| Prostate Cancer | A2ML1, BAX, C10orf47, C1orf162, CSDA, EIFC3, ETFB, GABARAPL2, GUK1, GZMH, |
| | HIST1H3B, HLA-A, HSP90AA1, NRGN, PRDX5, PTMA, RABAC1, RABAGAP1L, |
| | RPL22, SAP18, SEPW1, SOX1 |
| Prostate Cancer | NY-ESO-1, SSX-2, SSX-4, XAGE-lb, AMACR, p90 autoantigen, LEDGF |
| Prostate Cancer | A33, ABL2, ADAM10, AFP, ALA, ALIX, ALPL, ApoJ/CLU, ASCA, ASPH(A-10), |
| | ASPH(D01P), AURKB, B7H3, B7H3, B7H4, BCNP, BDNF, CA125(MUC16), CA-19-9, C- |
| | Bir, CD10, CD151, CD24, CD41, CD44, CD46, CD59(MEM-43), CD63, CD63, |
| | CD66eCEA, CD81, CD81, CD9, CD9, CDA, CDADC1, CRMP-2, CRP, CXCL12, CXCR3, |
| | CYFRA21-1, DDX-1, DLL4, DLL4, EGFR, Epcam, EphA2, ErbB2, ERG, EZH2, FASL, |
| | FLNA, FRT, GAL3, GATA2, GM-CSF, Gro-alpha, HAP, HER3(ErbB3), HSP70, HSPB1, |
| | hVEGFR2, iC3b, IL-1B, IL6R, IL6Unc, IL7Ralpha/CD127, IL8, INSIG-2, Integrin, KLK2, |
| | LAMN, Mammoglobin, M-CSF, MFG-E8, MIF, MISRII, MMP7, MMP9, MUC1, Muc1, |
| | MUC17, MUC2, Ncam, NDUFB7, NGAL, NK-2R(C-21), NT5E (CD73), p53, PBP, PCSA, |
| | PCSA, PDGFRB, PIM1, PRL, PSA, PSA, PSMA, PSMA, RAGE, RANK, RegIV, RUNX2, |
| | S100-A4, seprase/FAP, SERPINB3, SIM2(C-15), SPARC, SPC, SPDEF, SPP1, STEAP, |
| | STEAP4, TFF3, TGM2, TIMP-1, TMEM211, Trail-R2, Trail-R4, TrKB(poly), Trop2, |
| | Tsg101, TWEAK, UNC93A, VEGFA, wnt-5a(C-16) |
| Prostate Vesicles | CD9, CD63, CD81, PCSA, MUC2, MFG-E8 |
| Prostate Cancer | miR-148a, miR-329, miR-9, miR-378*, miR-25, miR-614, miR-518c*, miR-378, miR-765, |
| | let-7f-2*, miR-574-3p, miR-497, miR-32, miR-379, miR-520g, miR-542-5p, miR-342-3p, |
| | miR-1206, miR-663, miR-222 |
| Prostate Cancer | hsa-miR-877*, hsa-miR-593, hsa-miR-595, hsa-miR-300, hsa-miR-324-5p, hsa-miR-548a- |
| | 5p, hsa-miR-329, hsa-miR-550, hsa-miR-886-5p, hsa-miR-603, hsa-miR-490-3p, hsa-miR- |
| | 938, hsa-miR-149, hsa-miR-150, hsa-miR-1296, hsa-miR-384, hsa-miR-487a, hsa-miRPlus- |
| | C1089, hsa-miR-485-3p, hsa-miR-525-5p |
| Prostate Cancer | hsa-miR-451, hsa-miR-223, hsa-miR-593*, hsa-miR-1974, hsa-miR-486-5p, hsa-miR-19b, |
| | hsa-miR-320b, hsa-miR-92a, hsa-miR-21, hsa-miR-675*, hsa-miR-16, hsa-miR-876-5p, hsa- |
| | miR-144, hsa-miR-126, hsa-miR-137, hsa-miR-1913, hsa-miR-29b-1*, hsa-miR-15a, hsa- |
| | miR-93, hsa-miR-1266 |
| Inflammatory | miR-588, miR-1258, miR-16-2*, miR-938, miR-526b, miR-92b*, let-7d, miR-378*, miR- |
| Disease | 124, miR-376c, miR-26b, miR-1204, miR-574-3p, miR-195, miR-499-3p, miR-2110, miR- |
| | 888 |
| Prostate Cancer | A33, ADAM10, AMACR, ASPH (A-10), AURKB, B7H3, CA125, CA-19-9, C-Bir, CD24, |
| | CD3, CD41, CD63, CD66e CEA, CD81, CD9, CDADC1, CSA, CXCL12, DCRN, EGFR, |
| | EphA2, ERG, FLNA, FRT, GAL3, GM-CSF, Gro-alpha, HER 3 (ErbB3), hVEGFR2, IL6 |
| | Unc, Integrin, Mammaglobin, MFG-E8, MMP9, MUC1, MUC17, MUC2, NGAL, NK-2R(C- |
| | 21), NY-ESO-1, PBP, PCSA, PIM1, PRL, PSA, PSIP1/LEDGF, PSMA, RANK, S100-A4, |
| | seprase/FAP, SIM2 (C-15), SPDEF, SSX2, STEAP, TGM2, TIMP-1, Trail-R4, Tsg 101, |
| | TWEAK, UNC93A, VCAN, XAGE-1 |
| Prostate Cancer | A33, ADAM10, ALIX, AMACR, ASCA, ASPH (A-10), AURKB, B7H3, BCNP, CA125, |
| | CA-19-9, C-Bir (Flagellin), CD24, CD3, CD41, CD63, CD66e CEA, CD81, CD9, CDADC1, |
| | CRP, CSA, CXCL12, CYFRA21-1, DCRN, EGFR, EpCAM, EphA2, ERG, FLNA, GAL3, |
| | GATA2, GM-CSF, Gro alpha, HER3 (ErbB3), HSP70, hVEGFR2, iC3b, IL-1B, IL6 Unc, |
| | IL8, Integrin, KLK2, Mammaglobin, MFG-E8, MMP7, MMP9, MS4A1, MUC1, MUC17, |
| | MUC2, NGAL, NK-2R(C-21), NY-ESO-1, p53, PBP, PCSA, PIM1, PRL, PSA, PSMA, |
| | RANK, RUNX2, S100-A4, seprase/FAP, SERPINB3, SIM2 (C-15), SPC, SPDEF, SSX2, |
| | SSX4, STEAP, TGM2, TIMP-1, TRAIL R2, Trail-R4, Tsg 101, TWEAK, VCAN, VEGF A, |
| | XAGE |
| Prostate Vesicles | EpCam, CD81, PCSA, MUC2, MFG-E8 |
| Prostate Vesicles | CD9, CD63, CD81, MMP7, EpCAM |
| Prostate Cancer | let-7d, miR-148a, miR-195, miR-25, miR-26b, miR-329, miR-376c, miR-574-3p, miR-888, |
| | miR-9, miR1204, miR-16-2*, miR-497, miR-588, miR-614, miR-765, miR92b*, miR-938, |
| | let-7f-2*, miR-300, miR-523, miR-525-5p, miR-1182, miR-1244, miR-520d-3p, miR-379, |
| | let-7b, miR-125a-3p, miR-1296, miR-134, miR-149, miR-150, miR-187, miR-32, miR-324- |
| | 3p, miR-324-5p, miR-342-3p, miR-378, miR-378*, miR-384, miR-451, miR-455-3p, miR- |
| | 485-3p, miR-487a, miR-490-3p, miR-502-5p, miR-548a-5p, miR-550, miR-562, miR-593, |
| | miR-593*, miR-595, miR-602, miR-603, miR-654-5p, miR-877*, miR-886-5p, miR-125a-5p, |
| | miR-140-3p, miR-192, miR-196a, miR-2110, miR-212, miR-222, miR-224*, miR-30b*, |
| | miR-499-3p, miR-505* |
| Prostate Cancer | STAT3, EZH2, p53, MACC1, SPDEF, RUNX2, YB-1, AURKA, AURKB |
| Prostate Cancer | E.001036, E.001497, E.001561, E.002330, E.003402, E.003756, E.004838, E.005471, |
| (Ensembl ENSG | E.005882, E.005893, E.006210, E.006453, E.006625, E.006695, E.006756, E.007264, |
| identifiers) | E.007952, E.008118, E.008196, E.009694, E.009830, E.010244, E.010256, E.010278, |
| | E.010539, E.010810, E.011052, E.011114, E.011143, E.011304, E.011451, E.012061, |
| | E.012779, E.014216, E.014257, E.015133, E.015171, E.015479, E.015676, E.016402, |
| | E.018189, E.018699, E.020922, E.022976, E.023909, E.026508, E.026559, E.029363, |
| | E.029725, E.030582, E.033030, E.035141, E.036257, E.036448, E.038002, E.039068, |
| | E.039560, E.041353, E.044115, E.047410, E.047597, E.048544, E.048828, E.049239, |
| | E.049246, E.049883, E.051596, E.051620, E.052795, E.053108, E.054118, E.054938, |
| | E.056097, E.057252, E.057608, E.058729, E.059122, E.059378, E.059691, E.060339, |
| | E.060688, E.061794, E.061918, E.062485, E.063241, E.063244, E.064201, E.064489, |
| | E.064655, E.064886, E.065054, E.065057, E.065308, E.065427, E.065457, E.065485, |
| | E.065526, E.065548, E.065978, E.066455, E.066557, E.067248, E.067369, E.067704, |
| | E.068724, E.068885, E.069535, E.069712, E.069849, E.069869, E.069956, E.070501, |
| | E.070785, E.070814, E.071246, E.071626, E.071859, E.072042, E.072071, E.072110, |
| | E.072506, E.073050, E.073350, E.073584, E.073756, E.074047, E.074071, E.074964, |
| | E.075131, E.075239, E.075624, E.075651, E.075711, E.075856, E.075886, E.076043, |
| | E.076248, E.076554, E.076864, E.077097, E.077147, E.077312, E.077514, E.077522, |
| | E.078269, E.078295, E.078808, E.078902, E.079246, E.079313, E.079785, E.080572, |
| | E.080823, E.081087, E.081138, E.081181, E.081721, E.081842, E.082212, E.082258, |
| | E.082556, E.083093, E.083720, E.084234, E.084463, E.085224, E.085733, E.086062, |
| | E.086205, E.086717, E.087087, E.087301, E.088888, E.088899, E.088930, E.088992, |
| | E.089048, E.089127, E.089154, E.089177, E.089248, E.089280, E.089902, E.090013, |
| | E.090060, E.090565, E.090612, E.090615, E.090674, E.090861, E.090889, E.091140, |
| | E.091483, E.091542, E.091732, E.092020, E.092199, E.092421, E.092621, E.092820, |
| | E.092871, E.092978, E.093010, E.094755, E.095139, E.095380, E.095485, E.095627, |
| | E.096060, E.096384, E.099331, E.099715, E.099783, E.099785, E.099800, E.099821, |
| | E.099899, E.099917, E.099956, E.100023, E.100056, E.100065, E.100084, E.100142, |
| | E.100191, E.100216, E.100242, E.100271, E.100284, E.100299, E.100311, E.100348, |
| | E.100359, E.100393, E.100399, E.100401, E.100412, E.100442, E.100575, E.100577, |
| | E.100583, E.100601, E.100603, E.100612, E.100632, E.100714, E.100739, E.100796, |
| | E.100802, E.100815, E.100823, E.100836, E.100883, E.101057, E.101126, E.101152, |
| | E.101222, E.101246, E.101265, E.101365, E.101439, E.101557, E.101639, E.101654, |
| | E.101811, E.101812, E.101901, E.102030, E.102054, E.102103, E.102158, E.102174, |
| | E.102241, E.102290, E.102316, E.102362, E.102384, E.102710, E.102780, E.102904, |
| | E.103035, E.103067, E.103175, E.103194, E.103449, E.103479, E.103591, E.103599, |
| | E.103855, E.103978, E.104064, E.104067, E.104131, E.104164, E.104177, E.104228, |
| | E.104331, E.104365, E.104419, E.104442, E.104611, E.104626, E.104723, E.104760, |
| | E.104805, E.104812, E.104823, E.104824, E.105127, E.105220, E.105221, E.105281, |
| | E.105379, E.105402, E.105404, E.105409, E.105419, E.105428, E.105486, E.105514, |
| | E.105518, E.105618, E.105705, E.105723, E.105939, E.105948, E.106049, E.106078, |
| | E.106128, E.106153, E.106346, E.106392, E.106554, E.106565, E.106603, E.106633, |
| | E.107104, E.107164, E.107404, E.107485, E.107551, E.107581, E.107623, E.107798, |
| | E.107816, E.107833, E.107890, E.107897, E.107968, E.108296, E.108312, E.108375, |
| | E.108387, E.108405, E.108417, E.108465, E.108561, E.108582, E.108639, E.108641, |
| | E.108848, E.108883, E.108953, E.109062, E.109184, E.109572, E.109625, E.109758, |
| | E.109790, E.109814, E.109846, E.109956, E.110063, E.110066, E.110104, E.110107, |
| | E.110321, E.110328, E.110921, E.110955, E.111057, E.111218, E.111261, E.111335, |
| | E.111540, E.111605, E.111647, E.111785, E.111790, E.111801, E.111907, E.112039, |
| | E.112081, E.112096, E.112110, E.112144, E.112232, E.112234, E.112473, E.112578, |
| | E.112584, E.112715, E.112941, E.113013, E.113163, E.113282, E.113368, E.113441, |
| | E.113448, E.113522, E.113580, E.113645, E.113719, E.113739, E.113790, E.114054, |
| | E.114127, E.114302, E.114331, E.114388, E.114491, E.114861, E.114867, E.115053, |
| | E.115221, E.115234, E.115239, E.115241, E.115257, E.115339, E.115540, E.115541, |
| | E.115561, E.115604, E.115648, E.115738, E.115758, E.116044, E.116096, E.116127, |
| | E.116254, E.116288, E.116455, E.116478, E.116604, E.116649, E.116726, E.116754, |
| | E.116833, E.117298, E.117308, E.117335, E.117362, E.117411, E.117425, E.117448, |
| | E.117480, E.117592, E.117593, E.117614, E.117676, E.117713, E.117748, E.117751, |
| | E.117877, E.118181, E.118197, E.118260, E.118292, E.118513, E.118523, E.118640, |
| | E.118898, E.119121, E.119138, E.119318, E.119321, E.119335, E.119383, E.119421, |
| | E.119636, E.119681, E.119711, E.119820, E.119888, E.119906, E.120159, E.120328, |
| | E.120337, E.120370, E.120656, E.120733, E.120837, E.120868, E.120915, E.120948, |
| | E.121022, E.121057, E.121068, E.121104, E.121390, E.121671, E.121690, E.121749, |
| | E.121774, E.121879, E.121892, E.121903, E.121940, E.121957, E.122025, E.122033, |
| | E.122126, E.122507, E.122566, E.122705, E.122733, E.122870, E.122884, E.122952, |
| | E.123066, E.123080, E.123143, E.123154, E.123178, E.123416, E.123427, E.123595, |
| | E.123901, E.123908, E.123983, E.123992, E.124143, E.124164, E.124181, E.124193, |
| | E.124216, E.124232, E.124529, E.124562, E.124570, E.124693, E.124749, E.124767, |
| | E.124788, E.124795, E.124831, E.124942, E.125246, E.125257, E.125304, E.125352, |
| | E.125375, E.125445, E.125492, E.125676, E.125753, E.125798, E.125844, E.125868, |
| | E.125901, E.125944, E.125995, E.126062, E.126267, E.126653, E.126773, E.126777, |
| | E.126814, E.126858, E.126883, E.126934, E.126945, E.126952, E.127022, E.127328, |
| | E.127329, E.127399, E.127415, E.127554, E.127616, E.127720, E.127824, E.127884, |
| | E.127914, E.127946, E.127948, E.128050, E.128311, E.128342, E.128609, E.128626, |
| | E.128683, E.128708, E.128881, E.129315, E.129351, E.129355, E.129514, E.129636, |
| | E.129657, E.129757, E.129810, E.129990, E.130175, E.130177, E.130193, E.130255, |
| | E.130299, E.130305, E.130338, E.130340, E.130402, E.130413, E.130612, E.130713, |
| | E.130764, E.130770, E.130810, E.130826, E.130935, E.131351, E.131467, E.131473, |
| | E.131771, E.131773, E.132002, E.132275, E.132323, E.132382, E.132475, E.132481, |
| | E.132589, E.132646, E.132716, E.132881, E.133313, E.133315, E.133687, E.133835, |
| | E.133863, E.133874, E.133961, E.134077, E.134138, E.134207, E.134248, E.134308, |
| | E.134444, E.134452, E.134548, E.134684, E.134759, E.134809, E.134851, E.134955, |
| | E.135052, E.135297, E.135298, E.135387, E.135390, E.135476, E.135486, E.135525, |
| | E.135597, E.135679, E.135740, E.135829, E.135842, E.135870, E.135900, E.135914, |
| | E.135926, E.135940, E.135999, E.136044, E.136068, E.136152, E.136169, E.136280, |
| | E.136371, E.136383, E.136450, E.136521, E.136527, E.136574, E.136710, E.136750, |
| | E.136807, E.136874, E.136875, E.136930, E.136933, E.136935, E.137055, E.137124, |
| | E.137312, E.137409, E.137497, E.137513, E.137558, E.137601, E.137727, E.137776, |
| | E.137806, E.137814, E.137815, E.137948, E.137955, E.138028, E.138031, E.138041, |
| | E.138050, E.138061, E.138069, E.138073, E.138095, E.138160, E.138294, E.138347, |
| | E.138363, E.138385, E.138587, E.138594, E.138621, E.138674, E.138756, E.138757, |
| | E.138760, E.138772, E.138796, E.139211, E.139405, E.139428, E.139517, E.139613, |
| | E.139626, E.139684, E.139697, E.139874, E.140263, E.140265, E.140326, E.140350, |
| | E.140374, E.140382, E.140451, E.140481, E.140497, E.140632, E.140678, E.140694, |
| | E.140743, E.140932, E.141002, E.141012, E.141258, E.141378, E.141425, E.141429, |
| | E.141522, E.141543, E.141639, E.141744, E.141873, E.141994, E.142025, E.142208, |
| | E.142515, E.142606, E.142698, E.142765, E.142864, E.142875, E.143013, E.143294, |
| | E.143321, E.143353, E.143374, E.143375, E.143390, E.143578, E.143614, E.143621, |
| | E.143633, E.143771, E.143797, E.143816, E.143889, E.143924, E.143933, E.143947, |
| | E.144136, E.144224, E.144306, E.144381, E.144410, E.144485, E.144566, E.144671, |
| | E.144741, E.144935, E.145020, E.145632, E.145741, E.145833, E.145888, E.145907, |
| | E.145908, E.145919, E.145990, E.146067, E.146070, E.146281, E.146433, E.146457, |
| | E.146535, E.146701, E.146856, E.146966, E.147044, E.147127, E.147130, E.147133, |
| | E.147140, E.147231, E.147257, E.147403, E.147475, E.147548, E.147697, E.147724, |
| | E.148158, E.148396, E.148488, E.148672, E.148737, E.148835, E.149182, E.149218, |
| | E.149311, E.149480, E.149548, E.149646, E.150051, E.150593, E.150961, E.150991, |
| | E.151092, E.151093, E.151247, E.151304, E.151491, E.151690, E.151715, E.151726, |
| | E.151779, E.151806, E.152086, E.152207, E.152234, E.152291, E.152359, E.152377, |
| | E.152409, E.152422, E.152582, E.152763, E.152818, E.152942, E.153113, E.153140, |
| | E.153391, E.153904, E.153936, E.154099, E.154127, E.154380, E.154639, E.154723, |
| | E.154781, E.154832, E.154864, E.154889, E.154957, E.155368, E.155380, E.155508, |
| | E.155660, E.155714, E.155959, E.155980, E.156006, E.156194, E.156282, E.156304, |
| | E.156467, E.156515, E.156603, E.156650, E.156735, E.156976, E.157064, E.157103, |
| | E.157502, E.157510, E.157538, E.157551, E.157637, E.157764, E.157827, E.157992, |
| | E.158042, E.158290, E.158321, E.158485, E.158545, E.158604, E.158669, E.158715, |
| | E.158747, E.158813, E.158863, E.158901, E.158941, E.158987, E.159147, E.159184, |
| | E.159348, E.159363, E.159387, E.159423, E.159658, E.159692, E.159761, E.159921, |
| | E.160049, E.160226, E.160285, E.160294, E.160633, E.160685, E.160691, E.160789, |
| | E.160862, E.160867, E.160948, E.160972, E.161202, E.161267, E.161649, E.161692, |
| | E.161714, E.161813, E.161939, E.162069, E.162298, E.162385, E.162437, E.162490, |
| | E.162613, E.162641, E.162694, E.162910, E.162975, E.163041, E.163064, E.163110, |
| | E.163257, E.163468, E.163492, E.163530, E.163576, E.163629, E.163644, E.163749, |
| | E.163755, E.163781, E.163825, E.163913, E.163923, E.163930, E.163932, E.164045, |
| | E.164051, E.164053, E.164163, E.164244, E.164270, E.164300, E.164309, E.164442, |
| | E.164488, E.164520, E.164597, E.164749, E.164754, E.164828, E.164916, E.164919, |
| | E.164924, E.165084, E.165119, E.165138, E.165215, E.165259, E.165264, E.165280, |
| | E.165359, E.165410, E.165496, E.165637, E.165646, E.165661, E.165688, E.165695, |
| | E.165699, E.165792, E.165807, E.165813, E.165898, E.165923, E.165934, E.166263, |
| | E.166266, E.166329, E.166337, E.166341, E.166484, E.166526, E.166596, E.166598, |
| | E.166710, E.166747, E.166833, E.166860, E.166946, E.166971, E.167004, E.167085, |
| | E.167110, E.167113, E.167258, E.167513, E.167552, E.167553, E.167604, E.167635, |
| | E.167642, E.167658, E.167699, E.167744, E.167751, E.167766, E.167772, E.167799, |
| | E.167815, E.167969, E.167978, E.167987, E.167996, E.168014, E.168036, E.168066, |
| | E.168071, E.168148, E.168298, E.168393, E.168575, E.168653, E.168746, E.168763, |
| | E.168769, E.168803, E.168916, E.169087, E.169093, E.169122, E.169189, E.169213, |
| | E.169242, E.169410, E.169418, E.169562, E.169592, E.169612, E.169710, E.169763, |
| | E.169789, E.169807, E.169826, E.169957, E.170017, E.170027, E.170037, E.170088, |
| | E.170144, E.170275, E.170310, E.170315, E.170348, E.170374, E.170381, E.170396, |
| | E.170421, E.170430, E.170445, E.170549, E.170632, E.170703, E.170743, E.170837, |
| | E.170854, E.170906, E.170927, E.170954, E.170959, E.171121, E.171155, E.171180, |
| | E.171202, E.171262, E.171302, E.171345, E.171428, E.171488, E.171490, E.171492, |
| | E.171540, E.171643, E.171680, E.171723, E.171793, E.171861, E.171953, E.172115, |
| | E.172283, E.172345, E.172346, E.172466, E.172590, E.172594, E.172653, E.172717, |
| | E.172725, E.172733, E.172831, E.172867, E.172893, E.172939, E.173039, E.173230, |
| | E.173366, E.173473, E.173540, E.173585, E.173599, E.173714, E.173726, E.173805, |
| | E.173809, E.173826, E.173889, E.173898, E.173905, E.174021, E.174100, E.174332, |
| | E.174842, E.174996, E.175063, E.175110, E.175166, E.175175, E.175182, E.175198, |
| | E.175203, E.175216, E.175220, E.175334, E.175416, E.175602, E.175866, E.175946, |
| | E.176102, E.176105, E.176155, E.176171, E.176371, E.176515, E.176900, E.176971, |
| | E.176978, E.176994, E.177156, E.177239, E.177354, E.177409, E.177425, E.177459, |
| | E.177542, E.177548, E.177565, E.177595, E.177628, E.177674, E.177679, E.177694, |
| | E.177697, E.177731, E.177752, E.177951, E.178026, E.178078, E.178104, E.178163, |
| | E.178175, E.178187, E.178234, E.178381, E.178473, E.178741, E.178828, E.178950, |
| | E.179091, E.179115, E.179119, E.179348, E.179388, E.179776, E.179796, E.179869, |
| | E.179912, E.179981, E.180035, E.180198, E.180287, E.180318, E.180667, E.180869, |
| | E.180979, E.180998, E.181072, E.181163, E.181222, E.181234, E.181513, E.181523, |
| | E.181610, E.181773, E.181873, E.181885, E.181924, E.182013, E.182054, E.182217, |
| | E.182271, E.182318, E.182319, E.182512, E.182732, E.182795, E.182872, E.182890, |
| | E.182944, E.183048, E.183092, E.183098, E.183128, E.183207, E.183292, E.183431, |
| | E.183520, E.183684, E.183723, E.183785, E.183831, E.183856, E.184007, E.184047, |
| | E.184113, E.184156, E.184254, E.184363, E.184378, E.184470, E.184481, E.184508, |
| | E.184634, E.184661, E.184697, E.184708, E.184735, E.184840, E.184916, E.185043, |
| | E.185049, E.185122, E.185219, E.185359, E.185499, E.185554, E.185591, E.185619, |
| | E.185736, E.185860, E.185896, E.185945, E.185972, E.186198, E.186205, E.186376, |
| | E.186472, E.186575, E.186591, E.186660, E.186814, E.186834, E.186868, E.186889, |
| | E.187097, E.187323, E.187492, E.187634, E.187764, E.187792, E.187823, E.187837, |
| | E.187840, E.188021, E.188171, E.188186, E.188739, E.188771, E.188846, E.189060, |
| | E.189091, E.189143, E.189144, E.189221, E.189283, E.196236, E.196419, E.196436, |
| | E.196497, E.196504, E.196526, E.196591, E.196700, E.196743, E.196796, E.196812, |
| | E.196872, E.196975, E.196993, E.197081, E.197157, E.197217, E.197223, E.197299, |
| | E.197323, E.197353, E.197451, E.197479, E.197746, E.197779, E.197813, E.197837, |
| | E.197857, E.197872, E.197969, E.197976, E.198001, E.198033, E.198040, E.198087, |
| | E.198131, E.198156, E.198168, E.198205, E.198216, E.198231, E.198265, E.198366, |
| | E.198431, E.198455, E.198563, E.198586, E.198589, E.198712, E.198721, E.198732, |
| | E.198783, E.198793, E.198804, E.198807, E.198824, E.198841, E.198951, E.203301, |
| | E.203795, E.203813, E.203837, E.203879, E.203908, E.204231, E.204316, E.204389, |
| | E.204406, E.204560, E.204574 |
| Prostate Markers | E.005893 (LAMP2), E.006756 (ARSD), E.010539 (ZNF200), E.014257 (ACPP), E.015133 |
| (Ensembl ENSG | (CCDC88C), E.018699 (TTC27), E.044115 (CTNNA1), E.048828 (FAM120A), E.051620 |
| identifiers) | (HEBP2), E.056097 (ZFR), E.060339 (CCAR1), E.063241 (ISOC2), E.064489 (MEF2BNB- |
| | MEF2B), E.064886 (CHI3L2), E.066455 (GOLGA5), E.069535 (MAOB), E.072042 |
| | (RDH11), E.072071 (LPHN1), E.074047 (GLI2), E.076248 (UNG), E.076554 (TPD52), |
| | E.077147 (TM9SF3), E.077312 (SNRPA), E.081842 (PCDHA6), E.086717 (PPEF1), |
| | E.088888 (MAVS), E.088930 (XRN2), E.089902 (RCOR1), E.090612 (ZNF268), E.092199 |
| | (HNRNPC), E.095380 (NANS), E.099783 (HNRNPM), E.100191 (SLC5A4), E.100216 |
| | (TOMM22), E.100242 (SUN2), E.100284 (TOM1), E.100401 (RANGAP1), E.100412 |
| | (ACO2), E.100836 (PABPN1), E.102054 (RBBP7), E.102103 (PQBP1), E.103599 (IQCH), |
| | E.103978 (TMEM87A), E.104177 (MYEF2), E.104228 (TRIM35), E.105428 (ZNRF4), |
| | E.105518 (TMEM205), E.106603 (C7orf44; COA1), E.108405 (P2RX1), E.111057 |
| | (KRT18), E.111218 (PRMT8), E.112081 (SRSF3), E.112144 (ICK), E.113013 (HSPA9), |
| | E.113368 (LMNB1), E.115221 (ITGB6), E.116096 (SPR), E.116754 (SRSF11), E.118197 |
| | (DDX59), E.118898 (PPL), E.119121 (TRPM6), E.119711 (ALDH6A1), E.120656 (TAF12), |
| | E.121671 (CRY2), E.121774 (KHDRBS1), E.122126 (OCRL), E.122566 (HNRNPA2B1), |
| | E.123901 (GPR83), E.124562 (SNRPC), E.124788 (ATXN1), E.124795 (DEK), E.125246 |
| | (CLYBL), E.126883 (NUP214), E.127616 (SMARCA4), E.127884 (ECHS1), E.128050 |
| | (PAICS), E.129351 (ILF3), E.129757 (CDKN1C), E.130338 (TULP4), E.130612 |
| | (CYP2G1P), E.131351 (HAUS8), E.131467 (PSME3), E.133315 (MACROD1), E.134452 |
| | (FBXO18), E.134851 (TMEM165), E.135940 (COX5B), E.136169 (SETDB2), E.136807 |
| | (CDK9), E.137727 (ARHGAP20), E.138031 (ADCY3), E.138050 (THUMPD2), E.138069 |
| | (RAB1A), E.138594 (TMOD3), E.138760 (SCARB2), E.138796 (HADH), E.139613 |
| | (SMARCC2), E.139684 (ESD), E.140263 (SORD), E.140350 (ANP32A), E.140632 |
| | (GLYR1), E.142765 (SYTL1), E.143621 (ILF2), E.143933 (CALM2), E.144410 (CPO), |
| | E.147127 (RAB41), E.151304 (SRFBP1), E.151806 (GUF1), E.152207 (CYSLTR2), |
| | E.152234 (ATP5A1), E.152291 (TGOLN2), E.154723 (ATP5J), E.156467 (UQCRB), |
| | E.159387 (IRX6), E.159761 (C16orf86), E.161813 (LARP4), E.162613 (FUBP1), E.162694 |
| | (EXTL2), E.165264 (NDUFB6), E.167113 (COQ4), E.167513 (CDT1), E.167772 |
| | (ANGPTL4), E.167978 (SRRM2), E.168916 (ZNF608), E.169763 (PRYP3), E.169789 |
| | (PRY), E.169807 (PRY2), E.170017 (ALCAM), E.170144 (HNRNPA3), E.170310 (STX8), |
| | E.170954 (ZNF415), E.170959 (DCDC5), E.171302 (CANT1), E.171643 (S100Z), E.172283 |
| | (PRYP4), E.172590 (MRPL52), E.172867 (KRT2), E.173366 (TLR9), E.173599 (PC), |
| | E.177595 (PIDD), E.178473 (UCN3), E.179981 (TSHZ1), E.181163 (NPM1), E.182319 |
| | (Tyrosine-protein kinase SgK223), E.182795 (C1orf116), E.182944 (EWSR1), E.183092 |
| | (BEGAIN), E.183098 (GPC6), E.184254 (ALDH1A3), E.185619 (PCGF3), E.186889 |
| | (TMEM17), E.187837 (HIST1H1C), E.188771 (C11orf34), E.189060 (H1F0), E.196419 |
| | (XRCC6), E.196436 (NPIPL2), E.196504 (PRPF40A), E.196796, E.196993, E.197451 |
| | (HNRNPAB), E.197746 (PSAP), E.198131 (ZNF544), E.198156, E.198732 (SMOC1), |
| | E.198793 (MTOR), E.039068 (CDH1), E.173230 (GOLGB1), E.124193 (SRSF6), E.140497 |
| | (SCAMP2), E.168393 (DTYMK), E.184708 (EIF4ENIF1), E.124164 (VAPB), E.125753 |
| | (VASP), E.118260 (CREB1), E.135052 (GOLM1), E.010244 (ZNF207), E.010278 (CD9), |
| | E.047597 (XK), E.049246 (PER3), E.069849 (ATP1B3), E.072506 (HSD17B10), E.081138 |
| | (CDH7), E.099785 (MARCH2), E.104331 (IMPAD1), E.104812 (GYS1), E.120868 |
| | (APAF1), E.123908 (EIF2C2), E.125492 (BARHL1), E.127328 (RAB3IP), E.127329 |
| | (PTPRB), E.129514 (FOXA1), E.129657 (SEC14L1), E.129990 (SYT5), E.132881 (RSG1), |
| | E.136521 (NDUFB5), E.138347 (MYPN), E.141429 (GALNT1), E.144566 (RAB5A), |
| | E.151715 (TMEM45B), E.152582 (SPEF2), E.154957 (ZNF18), E.162385 (MAGOH), |
| | E.165410 (CFL2), E.168298 (HIST1H1E), E.169418 (NPR1), E.178187 (ZNF454), |
| | E.178741 (COX5A), E.179115 (FARSA), E.182732 (RGS6), E.183431 (SF3A3), E.185049 |
| | (WHSC2), E.196236 (XPNPEP3), E.197217 (ENTPD4), E.197813, E.203301, E.116833 |
| | (NR5A2), E.121057 (AKAP1), E.005471 (ABCB4), E.071859 (FAM50A), E.084234 |
| | (APLP2), E.101222 (SPEF1), E.103175 (WFDC1), E.103449 (SALL1), E.104805 (NUCB1), |
| | E.105514 (RAB3D), E.107816 (LZTS2), E.108375 (RNF43), E.109790 (KLHL5), E.112039 |
| | (FANCE), E.112715 (VEGFA), E.121690 (DEPDC7), E.125352 (RNF113A), E.134548 |
| | (C12orG9), E.136152 (COG3), E.143816 (WNT9A), E.147130 (ZMYM3), E.148396 |
| | (SEC16A), E.151092 (NGLY1), E.151779 (NBAS), E.155508 (CNOT8), E.163755 (HPS3), |
| | E.166526 (ZNF3), E.172733 (PURG), E.176371 (ZSCAN2), E.177674 (AGTRAP), |
| | E.181773 (GPR3), E.183048 (SLC25A10; MRPL12 SLC25A10), E.186376 (ZNF75D), |
| | E.187323 (DCC), E.198712 (MT-CO2), E.203908 (C6orf221; KHDC3L), E.001497 |
| | (LAS1L), E.009694 (ODZ1), E.080572 (CXorf41; PIH1D3), E.083093 (PALB2), E.089048 |
| | (ESF1), E.100065 (CARD10), E.100739 (BDKRB1), E.102904 (TSNAXIP1), E.104824 |
| | (HNRNPL), E.107404 (DVL1), E.110066 (SUV420H1), E.120328 (PCDHB12), E.121903 |
| | (ZSCAN20), E.122025 (FLT3), E.136930 (PSMB7), E.142025 (DMRTC2), E.144136 |
| | (SLC20A1), E.146535 (GNA12), E.147140 (NONO), E.153391 (INO80C), E.164919 |
| | (COX6C), E.171540 (OTP), E.177951 (BET1L), E.179796 (LRRC3B), E.197479 |
| | (PCDHB11), E.198804 (MT-CO1), E.086205 (FOLH1), E.100632 (ERH), E.100796 |
| | (SMEK1), E.104760 (FGL1), E.114302 (PRKAR2A), E.130299 (GTPBP3), E.133961 |
| | (NUMB), E.144485 (HES6), E.167085 (PHB), E.167635 (ZNF146), E.177239 (MAN1B1), |
| | E.184481 (FOXO4), E.188171 (ZNF626), E.189221 (MAOA), E.157637 (SLC38A10), |
| | E.100883 (SRP54), E.105618 (PRPF31), E.119421 (NDUFA8), E.170837 (GPR27), |
| | E.168148 (HIST3H3), E.135525 (MAP7), E.174996 (KLC2), E.018189 (RUFY3), E.183520 |
| | (UTP11L), E.173905 (GOLIM4), E.165280 (VCP), E.022976 (ZNF839), E.059691 |
| | (PET112), E.063244 (U2AF2), E.075651 (PLD1), E.089177 (KIF16B), E.089280 (FUS), |
| | E.094755 (GABRP), E.096060 (FKBP5), E.100023 (PPIL2), E.100359 (SGSM3), E.100612 |
| | (DHRS7), E.104131 (EIF3J), E.104419 (NDRG1), E.105409 (ATP1A3), E.107623 (GDF10), |
| | E.111335 (OAS2), E.113522 (RAD50), E.115053 (NCL), E.120837 (NFYB), E.122733 |
| | (KIAA1045), E.123178 (SPRYD7), E.124181 (PLCG1), E.126858 (RHOT1), E.128609 |
| | (NDUFA5), E.128683 (GAD1), E.130255 (RPL36), E.133874 (RNF122), E.135387 |
| | (CAPRIN1), E.135999 (EPC2), E.136383 (ALPK3), E.139405 (C12orf52), E.141012 |
| | (GALNS), E.143924 (EML4), E.144671 (SLC22A14), E.145741 (BTF3), E.145907 |
| | (G3BP1), E.149311 (ATM), E.153113 (CAST), E.157538 (DSCR3), E.157992 (KRTCAP3), |
| | E.158901 (WFDC8), E.165259 (HDX), E.169410 (PTPN9), E.170421 (KRT8), E.171155 |
| | (C1GALT1C1), E.172831 (CES2), E.173726 (TOMM20), E.176515, E.177565 (TBL1XR1), |
| | E.177628 (GBA), E.179091 (CYC1), E.189091 (SF3B3), E.197299 (BLM), E.197872 |
| | (FAM49A), E.198205 (ZXDA), E.198455 (ZXDB), E.082212 (ME2), E.109956 (B3GAT1), |
| | E.169710 (FASN), E.011304 (PTBP1), E.057252 (SOAT1), E.059378 (PARP12), E.082258 |
| | (CCNT2), E.087301 (TXNDC16), E.100575 (TIMM9), E.101152 (DNAJC5), E.101812 |
| | (H2BFM), E.102384 (CENPI), E.108641 (B9D1), E.119138 (KLF9), E.119820 (YIPF4), |
| | E.125995 (ROMO1), E.132323 (ILKAP), E.134809 (TIMM10), E.134955 (SLC37A2), |
| | E.135476 (ESPL1), E.136527 (TRA2B), E.137776 (SLTM), E.139211 (AMIGO2), E.139428 |
| | (MMAB), E.139874 (SSTR1), E.143321 (HDGF), E.164244 (PRRC1), E.164270 (HTR4), |
| | E.165119 (HNRNPK), E.165637 (VDAC2), E.165661 (QSOX2), E.167258 (CDK12), |
| | E.167815 (PRDX2), E.168014 (C2CD3), E.168653 (NDUFS5), E.168769 (TET2), E.169242 |
| | (EFNA1), E.175334 (BANF1), E.175416 (CLTB), E.177156 (TALDO1), E.180035 (ZNF48), |
| | E.186591 (UBE2H), E.187097 (ENTPD5), E.188739 (RBM34), E.196497 (IPO4), E.197323 |
| | (TRIM33), E.197857 (ZNF44), E.197976 (AKAP17A), E.064201 (TSPAN32), E.088992 |
| | (TESC), E.092421 (SEMA6A), E.100601 (ALKBH1), E.101557 (USP14), E.103035 |
| | (PSMD7), E.106128 (GHRHR), E.115541 (HSPE1), E.121390 (PSPC1), E.124216 (SNAI1), |
| | E.130713 (EXOSC2), E.132002 (DNAJB1), E.139697 (SBNO1), E.140481 (CCDC33), |
| | E.143013 (LMO4), E.145020 (AMT), E.145990 (GFOD1), E.146070 (PLA2G7), E.164924 |
| | (YWHAZ), E.165807 (PPP1R36), E.167751 (KLK2), E.169213 (RAB3B), E.170906 |
| | (NDUFA3), E.172725 (CORO1B), E.174332 (GLIS1), E.181924 (CHCHD8), E.183128 |
| | (CALHM3), E.204560 (DHX16), E.204574 (ABCF1), E.146701 (MDH2), E.198366 |
| | (HIST1H3A), E.081181 (ARG2), E.185896 (LAMP1), E.077514 (POLD3), E.099800 |
| | (TIMM13), E.100299 (ARSA), E.105419 (MEIS3), E.108417 (KRT37), E.113739 (STC2), |
| | E.125868 (DSTN), E.145908 (ZNF300), E.168575 (SLC20A2), E.182271 (TMIGD1), |
| | E.197223 (C1D), E.186834 (HEXIM1), E.001561 (ENPP4), E.011451 (WIZ), E.053108 |
| | (FSTL4), E.064655 (EYA2), E.065308 (TRAM2), E.075131 (TIPIN), E.081087 (OSTM1), |
| | E.092020 (PPP2R3C), E.096384 (HSP90AB1), E.100348 (TXN2), E.100577 (GSTZ1), |
| | E.100802 (C14orf93), E.101365 (IDH3B), E.101654 (RNMT), E.103067 (ESRP2), E.104064 |
| | (GABPB1), E.104823 (ECH1), E.106565 (TMEM176B), E.108561 (C1QBP), E.115257 |
| | (PCSK4), E.116127 (ALMS1), E.117411 (B4GALT2), E.119335 (SET), E.120337 |
| | (TNFSF18), E.122033 (MTIF3), E.122507 (BBS9), E.122870 (BICC1), E.130177 (CDC16), |
| | E.130193 (C8orf55; THEM6), E.130413 (STK33), E.130770 (ATPIF1), E.133687 (TMTC1), |
| | E.136874 (STX17), E.137409 (MTCH1), E.139626 (ITGB7), E.141744 (PNMT), E.145888 |
| | (GLRA1), E.146067 (FAM193B), E.146433 (TMEM181), E.149480 (MTA2), E.152377 |
| | (SPOCK1), E.152763 (WDR78), E.156976 (EIF4A2), E.157827 (FMNL2), E.158485 |
| | (CD1B), E.158863 (FAM160B2), E.161202 (DVL3), E.161714 (PLCD3), E.163064 (EN1), |
| | E.163468 (CCT3), E.164309 (CMYA5), E.164916 (FOXK1), E.165215 (CLDN3), E.167658 |
| | (EEF2), E.170549 (IRX1), E.171680 (PLEKHG5), E.178234 (GALNT11), E.179869 |
| | (ABCA13), E.179912 (R3HDM2), E.180869 (C1orf180), E.180979 (LRRC57), E.182872 |
| | (RBM10), E.183207 (RUVBL2), E.184113 (CLDN5), E.185972 (CCIN), E.189144 |
| | (ZNF573), E.197353 (LYPD2), E.197779 (ZNF81), E.198807 (PAX9), E.100442 (FKBP3), |
| | E.111790 (FGFR1OP2), E.136044 (APPL2), E.061794 (MRPS35), E.065427 (KARS), |
| | E.068885 (IFT80), E.104164 (PLDN; BLOC1S6), E.105127 (AKAP8), E.123066 |
| | (MED13L), E.124831 (LRRFIP1), E.125304 (TM9SF2), E.126934 (MAP2K2), E.130305 |
| | (NSUN5), E.135298 (BAI3), E.135900 (MRPL44), E.136371 (MTHFS), E.136574 |
| | (GATA4), E.140326 (CDAN1), E.141378 (PTRH2), E.141543 (EIF4A3), E.150961 |
| | (SEC24D), E.155368 (DBI), E.161649 (CD300LG), E.161692 (DBF4B), E.162437 |
| | (RAVER2), E.163257 (DCAF16), E.163576 (EFHB), E.163781 (TOPBP1), E.163913 |
| | (IFT122), E.164597 (COG5), E.165359 (DDX26B), E.165646 (SLC18A2), E.169592 |
| | (INO80E), E.169957 (ZNF768), E.171492 (LRRC8D), E.171793 (CTPS; CTPS1), E.171953 |
| | (ATPAF2), E.175182 (FAM131A), E.177354 (C10orf71), E.181610 (MRPS23), E.181873 |
| | (IBA57), E.187792 (ZNF70), E.187823 (ZCCHC16), E.196872 (C2orf55; KIAA1211L), |
| | E.198168 (SVIP), E.160633 (SAFB), E.177697 (CD151), E.181072 (CHRM2), E.012779 |
| | (ALOX5), E.065054 (SLC9A3R2), E.074071 (MRPS34), E.100815 (TRIP11), E.102030 |
| | (NAA10), E.106153 (CHCHD2), E.126814 (TRMT5), E.126952 (NXF5), E.136450 |
| | (SRSF1), E.136710 (CCDC115), E.137124 (ALDH1B1), E.143353 (LYPLAL1), E.162490 |
| | (C1orf187; DRAXIN), E.167799 (NUDT8), E.171490 (RSL1D1), E.173826 (KCNH6), |
| | E.173898 (SPTBN2), E.176900 (OR51T1), E.181513 (ACBD4), E.185554 (NXF2), |
| | E.185945 (NXF2B), E.108848 (LUC7L3), E.029363 (BCLAF1), E.038002 (AGA), E.108312 |
| | (UBTF), E.166341 (DCHS1), E.054118 (THRAP3), E.135679 (MDM2), E.166860 |
| | (ZBTB39), E.183684 (THOC4; ALYREF), E.004838 (ZMYND10), E.007264 (MATK), |
| | E.020922 (MRE11A), E.041353 (RAB27B), E.052795 (FNIP2), E.075711 (DLG1), |
| | E.087087 (SRRT), E.090060 (PAPOLA), E.095139 (ARCN1), E.099715 (PCDH11Y), |
| | E.100271 (TTLL1), E.101057 (MYBL2), E.101265 (RASSF2), E.101901 (ALG13), |
| | E.102290 (PCDH11X), E.103194 (USP10), E.106554 (CHCHD3), E.107833 (NPM3), |
| | E.110063 (DCPS), E.111540 (RAB5B), E.113448 (PDE4D), E.115339 (GALNT3), |
| | E.116254 (CHD5), E.117425 (PTCH2), E.117614 (SYF2), E.118181 (RPS25), E.118292 |
| | (C1orf54), E.119318 (RAD23B), E.121022 (COPS5), E.121104 (FAM117A), E.123427 |
| | (METTL21B), E.125676 (THOC2), E.132275 (RRP8), E.137513 (NARS2), E.138028 |
| | (CGREF1), E.139517 (LNX2), E.143614 (GATAD2B), E.143889 (HNRPLL), E.145833 |
| | (DDX46), E.147403 (RPL10), E.148158 (SNX30), E.151690 (MFSD6), E.153904 (DDAH1), |
| | E.154781 (C3orf19), E.156650 (KAT6B), E.158669 (AGPAT6), E.159363 (ATP13A2), |
| | E.163530 (DPPA2), E.164749 (HNF4G), E.165496 (RPL10L), E.165688 (PMPCA), |
| | E.165792 (METTL17), E.166598 (HSP90B1), E.168036 (CTNNB1), E.168746 (C20orf62), |
| | E.170381 (SEMA3E), E.171180 (OR2M4), E.171202 (TMEM126A), E.172594 |
| | (SMPDL3A), E.172653 (C17orf66), E.173540 (GMPPB), E.173585 (CCR9), E.173809 |
| | (TDRD12), E.175166 (PSMD2), E.177694 (NAALADL2), E.178026 (FAM211B; |
| | C22orf36), E.184363 (PKP3), E.187634 (SAMD11), E.203837 (PNLIPRP3), E.169122 |
| | (FAM110B), E.197969 (VPS13A), E.136068 (FLNB), E.075856 (SART3), E.081721 |
| | (DUSP12), E.102158 (MAGT1), E.102174 (PHEX), E.102316 (MAGED2), E.104723 |
| | (TUSC3), E.105939 (ZC3HAV1), E.108883 (EFTUD2), E.110328 (GALNTL4), E.111785 |
| | (RIC8B), E.113163 (COL4A3BP), E.115604 (IL18R1), E.117362 (APH1A), E.117480 |
| | (FAAH), E.124767 (GLO1), E.126267 (COX6B1), E.130175 (PRKCSH), E.135926 |
| | (TMBIM1), E.138674 (SEC31A), E.140451 (PIF1), E.143797 (MBOAT2), E.149646 |
| | (C20orf152), E.157064 (NMNAT2), E.160294 (MCM3AP), E.165084 (C8orf34), E.166946 |
| | (CCNDBP1), E.170348 (TMED10), E.170703 (TTLL6), E.175198 (PCCA), E.180287 |
| | (PLD5), E.183292 (MIR5096), E.187492 (CDHR4), E.188846 (RPL14), E.015479 |
| | (MATR3), E.100823 (APEX1), E.090615 (GOLGA3), E.086062 (B4GALT1), E.138385 |
| | (SSB), E.140265 (ZSCAN29), E.140932 (CMTM2), E.167969 (ECI1), E.135486 |
| | (HNRNPA1), E.137497 (NUMA1), E.181523 (SGSH), E.099956 (SMARCB1), E.049883 |
| | (PTCD2), E.082556 (OPRK1), E.090674 (MCOLN1), E.107164 (FUBP3), E.108582 (CPD), |
| | E.109758 (HGFAC), E.111605 (CPSF6), E.115239 (ASB3), E.121892 (PDS5A), E.125844 |
| | (RRBP1), E.130826 (DKC1), E.132481 (TRIM47), E.135390 (ATP5G2), E.136875 (PRPF4), |
| | E.138621 (PPCDC), E.145632 (PLK2), E.150051 (MKX), E.153140 (CETN3), E.154127 |
| | (UBASH3B), E.156194 (PPEF2), E.163825 (RTP3), E.164053 (ATRIP), E.164442 |
| | (CITED2), E.168066 (SF1), E.170430 (MGMT), E.175602 (CCDC85B), E.177752 (YIPF7), |
| | E.182512 (GLRX5), E.188186 (C7orf59), E.198721 (ECI2), E.204389 (HSPA1A), E.010256 |
| | (UQCRC1), E.076043 (REXO2), E.102362 (SYTL4), E.161939 (C17orf49), E.173039 |
| | (RELA), E.014216 (CAPN1), E.054938 (CHRDL2), E.065526 (SPEN), E.070501 (POLB), |
| | E.078808 (SDF4), E.083720 (OXCT1), E.100084 (HIRA), E.101246 (ARFRP1), E.102241 |
| | (HTATSF1), E.103591 (AAGAB), E.104626 (ERI1), E.105221 (AKT2), E.105402 (NAPA), |
| | E.105705 (SUGP1), E.106346 (USP42), E.108639 (SYNGR2), E.110107 (PRPF19), |
| | E.112473 (SLC39A7), E.113282 (CLINT1), E.115234 (SNX17), E.115561 (CHMP3), |
| | E.119906 (FAM178A), E.120733 (KDM3B), E.125375 (ATP5S), E.125798 (FOXA2), |
| | E.127415 (IDUA), E.129810 (SGOL1), E.132382 (MYBBP1A), E.133313 (CNDP2), |
| | E.134077 (THUMPD3), E.134248 (HBXIP), E.135597 (REPS1), E.137814 (HAUS2), |
| | E.138041 (SMEK2), E.140382 (HMG20A), E.143578 (CREB3L4), E.144224 (UBXN4), |
| | E.144306 (SCRN3), E.144741 (SLC25A26), E.145919 (BOD1), E.146281 (PM20D2), |
| | E.152359 (POC5), E.152409 (JMY), E.154889 (MPPE1), E.157551 (KCNJ15), E.157764 |
| | (BRAF), E.158987 (RAPGEF6), E.162069 (CCDC64B), E.162910 (MRPL55), E.163749 |
| | (CCDC158), E.164045 (CDC25A), E.164300 (SERINC5), E.165898 (ISCA2), E.167987 |
| | (VPS37C), E.168763 (CNNM3), E.170374 (SP7), E.171488 (LRRC8C), E.178381 |
| | (ZFAND2A), E.180998 (GPR137C), E.182318 (ZSCAN22), E.198040 (ZNF84), E.198216 |
| | (CACNA1E), E.198265 (HELZ), E.198586 (TLK1), E.203795 (FAM24A), E.204231 |
| | (RXRB), E.123992 (DNPEP), E.184634 (MED12), E.181885 (CLDN7), E.186660 (ZFP91), |
| | E.126777 (KTN1), E.080823 (MOK), E.101811 (CSTF2), E.124570 (SERPINB6), E.148835 |
| | (TAF5), E.158715 (SLC45A3), E.110955 (ATP5B), E.127022 (CANX), E.142208 (AKT1), |
| | E.128881 (TTBK2), E.147231 (CXorf57), E.006210 (CX3CL1), E.009830 (POMT2), |
| | E.011114 (BTBD7), E.065057 (NTHL1), E.068724 (TTC7A), E.073584 (SMARCE1), |
| | E.079785 (DDX1), E.084463 (WBP11), E.091140 (DLD), E.099821 (POLRMT), E.101126 |
| | (ADNP), E.104442 (ARMC1), E.105486 (LIG1), E.110921 (MVK), E.113441 (LNPEP), |
| | E.115758 (ODC1), E.116726 (PRAMEF12), E.119681 (LTBP2), E.136933 (RABEPK), |
| | E.137815 (RTF1), E.138095 (LRPPRC), E.138294 (MSMB), E.141873 (SLC39A3), |
| | E.142698 (C1orf94), E.143390 (RFX5), E.148488 (ST8SIA6), E.148737 (TCF7L2), |
| | E.151491 (EPS8), E.152422 (XRCC4), E.154832 (CXXC1), E.158321 (AUTS2), E.159147 |
| | (DONSON), E.160285 (LSS), E.160862 (AZGP1), E.160948 (VPS28), E.160972 |
| | (PPP1R16A), E.165934 (CPSF2), E.167604 (NFKBID), E.167766 (ZNF83), E.168803 |
| | (ADAL), E.169612 (FAM103A1), E.171262 (FAM98B), E.172893 (DHCR7), E.173889 |
| | (PHC3), E.176971 (FIBIN), E.177548 (RABEP2), E.179119 (SPTY2D1), E.184378 |
| | (ACTRT3), E.184508 (HDDC3), E.185043 (CIB1), E.186814 (ZSCAN30), E.186868 |
| | (MAPT), E.196812 (ZSCAN16), E.198563 (DDX39B), E.124529 (HIST1H4B), E.141002 |
| | (TCF25), E.174100 (MRPL45), E.109814 (UGDH), E.138756 (BMP2K), E.065457 |
| | (ADAT1), E.105948 (TTC26), E.109184 (DCUN1D4), E.125257 (ABCC4), E.126062 |
| | (TMEM115), E.142515 (KLK3), E.144381 (HSPD1), E.166710 (B2M), E.198824 |
| | (CHAMP1), E.078902 (TOLLIP), E.099331 (MYO9B), E.102710 (FAM48A), E.107485 |
| | (GATA3), E.120948 (TARDBP), E.187764 (SEMA4D), E.103855 (CD276), E.117751 |
| | (PPP1R8), E.173714 (WFIKKN2), E.172115 (CYCS), E.005882 (PDK2), E.007952 (NOX1), |
| | E.008118 (CAMK1G), E.012061 (ERCC1), E.015171 (ZMYND11), E.036257 (CUL3), |
| | E.057608 (GDI2), E.058729 (RIOK2), E.071246 (VASH1), E.073050 (XRCC1), E.073350 |
| | (LLGL2), E.079246 (XRCC5), E.085733 (CTTN), E.091542 (ALKBH5), E.091732 |
| | (ZC3HC1), E.092621 (PHGDH), E.099899 (TRMT2A), E.099917 (MED15), E.101439 |
| | (CST3), E.103479 (RBL2), E.104611 (SH2D4A), E.105281 (SLC1A5), E.106392 |
| | (C1GALT1), E.107104 (KANK1), E.107798 (LIPA), E.108296 (CWC25), E.109572 |
| | (CLCN3), E.112110 (MRPL18), E.113790 (EHHADH), E.115648 (MLPH), E.117308 |
| | (GALE), E.117335 (CD46), E.118513 (MYB), E.118640 (VAMP8), E.119321 (FKBP15), |
| | E.122705 (CLTA), E.123983 (ACSL3), E.124232 (RBPJL), E.125901 (MRPS26), E.127399 |
| | (LRRC61), E.127554 (GFER), E.128708 (HAT1), E.129355 (CDKN2D), E.130340 (SNX9), |
| | E.130935 (NOL11), E.131771 (PPP1R1B), E.133863 (TEX15), E.134207 (SYT6), E.136935 |
| | (GOLGA1), E.141425 (RPRD1A), E.143374 (TARS2), E.143771 (CNIH4), E.146966 |
| | (DENND2A), E.148672 (GLUD1), E.150593 (PDCD4), E.153936 (HS2ST1), E.154099 |
| | (DNAAF1), E.156006 (NAT2), E.156282 (CLDN17), E.158545 (ZC3H18), E.158604 |
| | (TMED4), E.158813 (EDA), E.159184 (HOXB13), E.161267 (BDH1), E.163492 |
| | (CCDC141), E.163629 (PTPN13), E.164163 (ABCE1), E.164520 (RAET1E), E.165138 |
| | (ANKS6), E.165923 (AGBL2), E.166484 (MAPK7), E.166747 (AP1G1), E.166971 |
| | (AKTIP), E.167744 (NTF4), E.168071 (CCDC88B), E.169087 (HSPBAP1), E.170396 |
| | (ZNF804A), E.170445 (HARS), E.170632 (ARMC10), E.170743 (SYT9), E.171428 |
| | (NAT1), E.172346 (CSDC2), E.173805 (HAP1), E.175175 (PPM1E), E.175203 (DCTN2), |
| | E.177542 (SLC25A22), E.177679 (SRRM3), E.178828 (RNF186), E.182013 (PNMAL1), |
| | E.182054 (IDH2), E.182890 (GLUD2), E.184156 (KCNQ3), E.184697 (CLDN6), E.184735 |
| | (DDX53), E.184840 (TMED9), E.185219 (ZNF445), E.186198 (SLC51B), E.186205 |
| | (MOSC1; MARC1), E.189 143 (CLDN4), E.196700 (ZNF512B), E.196743 (GM2A), |
| | E.198087 (CD2AP), E.198951 (NAGA), E.204406 (MBD5), E.002330 (BAD), E.105404 |
| | (RABAC1), E.114127 (XRN1), E.117713 (ARID1A), E.123143 (PKN1), E.130764 |
| | (LRRC47), E.131773 (KHDRBS3), E.137806 (NDUFAF1), E.142864 (SERBP1), E.158747 |
| | (NBL1), E.175063 (UBE2C), E.178104 (PDE4DIP), E.186472 (PCLO), E.069956 (MAPK6), |
| | E.112941 (PAPD7), E.116604 (MEF2D), E.142875 (PRKACB), E.147133 (TAF1), |
| | E.157510 (AFAP1L1), E.006625 (GGCT), E.155980 (KIF5A), E.134444 (KIAA1468), |
| | E.107968 (MAP3K8), E.117592 (PRDX6), E.123154 (WDR83), E.135297 (MTO1), |
| | E.135829 (DHX9), E.149548 (CCDC15), E.152086 (TUBA3E), E.167553 (TUBA1C), |
| | E.169826 (CSGALNACT2), E.171121 (KCNMB3), E.198033 (TUBA3C), E.147724 |
| | (FAM135B), E.170854 (MINA), E.006695 (COX10), E.067369 (TP53BP1), E.089248 |
| | (ERP29), E.112096 (SOD2), E.138073 (PREB), E.146856 (AGBL3), E.159423 (ALDH4A1), |
| | E.171345 (KRT19), E.172345 (STARD5), E.111647 (UHRF1BP1L), E.117877 (CD3EAP), |
| | E.155714 (PDZD9), E.156603 (MED19), E.075886 (TUBA3D), E.167699 (GLOD4), |
| | E.121749 (TBC1D15), E.090861 (AARS), E.093010 (COMT), E.117676 (RPS6KA1), |
| | E.157502 (MUM1L1), E.159921 (GNE), E.169562 (GJB1), E.179776 (CDH5), E.071626 |
| | (DAZAP1), E.085224 (ATRX), E.116478 (HDAC1), E.117298 (ECE1), E.176171 (BNIP3), |
| | E.177425 (PAWR), E.179348 (GATA2), E.187840 (EIF4EBP1), E.033030 (ZCCHC8), |
| | E.049239 (H6PD), E.060688 (SNRNP40), E.075239 (ACAT1), E.095627 (TDRD1), |
| | E.109625 (CPZ), E.113719 (ERGIC1), E.126773 (C14orf135; PCNXL4), E.149218 |
| | (ENDOD1), E.162975 (KCNF1), E.183785 (TUBA8), E.198589 (LRBA), E.105379 (ETFB), |
| | E.011052 (NME2), E.011143 (MKS1), E.048544 (MRPS10), E.062485 (CS), E.114054 |
| | (PCCB), E.138587 (MNS1), E.155959 (VBP1), E.181222 (POLR2A), E.183723 (CMTM4), |
| | E.184661 (CDCA2), E.204316 (MRPL38), E.140694 (PARN), E.035141 (FAM136A), |
| | E.095485 (CWF19L1), E.115540 (MOB4), E.123595 (RAB9A), E.140678 (ITGAX), |
| | E.141258 (SGSM2), E.158941 (KIAA1967), E.169189 (NSMCE1), E.198431 (TXNRD1), |
| | E.016402 (IL20RA), E.112234 (FBXL4), E.125445 (MRPS7), E.128342 (LIF), E.164051 |
| | (CCDC51), E.175866 (BAIAP2), E.102780 (DGKH), E.203813 (HIST1H3H), E.198231 |
| | (DDX42), E.030582 (GRN), E.106049 (HIBADH), E.130810 (PPAN), E.132475 (H3F3B), |
| | E.158290 (CUL4B), E.166266 (CUL5), E.026559 (KCNG1), E.059122 (FLYWCH1), |
| | E.107897 (ACBD5), E.121068 (TBX2), E.125944 (HNRNPR), E.134308 (YWHAQ), |
| | E.137558 (PI15), E.137601 (NEK1), E.147548 (WHSC1L1), E.149182 (ARFGAP2), |
| | E.159658 (KIAA0494), E.165699 (TSC1), E.170927 (PKHD1), E.186575 (NF2), E.188021 |
| | (UBQLN2), E.167552 (TUBA1A), E.003756 (RBM5), E.134138 (MEIS2), E.008196 |
| | (TFAP2B), E.079313 (REXO1), E.089127 (OAS1), E.106078 (COBL), E.113645 (WWC1), |
| | E.116288 (PARK7), E.121940 (CLCC1), E.136280 (CCM2), E.141639 (MAPK4), E.147475 |
| | (ERLIN2), E.155660 (PDIA4), E.162298 (SYVN1), E.176978 (DPP7), E.176994 (SMCR8), |
| | E.178175 (ZNF366), E.196591 (HDAC2), E.127824 (TUBA4A), E.163932 (PRKCD), |
| | E.143375 (CGN), E.076864 (RAP1GAP), E.138772 (ANXA3), E.163041 (H3F3A), |
| | E.165813 (C10orf118), E.166337 (TAF10), E.178078 (STAP2), E.184007 (PTP4A2), |
| | E.167004 (PDIA3), E.039560 (RAI14), E.119636 (C14orf45), E.140374 (ETFA), E.143633 |
| | (C1orf131), E.144935 (TRPC1), E.156735 (BAG4), E.159348 (CYB5R1), E.170275 |
| | (CRTAP), E.172717 (FAM71D), E.172939 (OXSR1), E.176105 (YES1), E.078295 |
| | (ADCY2), E.119888 (EPCAM), E.141522 (ARHGDIA), E.184047 (DIABLO), E.109062 |
| | (SLC9A3R1), E.170037 (CNTROB), E.066557 (LRRC40), E.074964 (ARHGEF10L), |
| | E.078269 (SYNJ2), E.090013 (BLVRB), E.100142 (POLR2F), E.100399 (CHADL), |
| | E.104365 (IKBKB), E.111261 (MANSC1), E.111907 (TPD52L1), E.112578 (BYSL), |
| | E.121957 (GPSM2), E.122884 (P4HA1), E.124693 (HIST1H3B), E.126653 (NSRP1), |
| | E.130402 (ACTN4), E.138757 (G3BP2), E.150991 (UBC), E.164828 (SUN1), E.175216 |
| | (CKAP5), E.176155 (CCDC57), E.177459 (C8orf47), E.183856 (IQGAP3), E.185122 |
| | (HSF1), E.122952 (ZWINT), E.151093 (OXSM), E.067704 (IARS2), E.088899 (ProSAP- |
| | interacting protein 1), E.091483 (FH), E.114388 (NPRL2), E.114861 (FOXP1), E.135914 |
| | (HTR2B), E.197837 (HIST4H4), E.127720 (C12orf26; METTL25), E.123416 (TUBA1B), |
| | E.047410 (TPR), E.117748 (RPA2), E.133835 (HSD17B4), E.067248 (DHX29), E.121879 |
| | (PIK3CA), E.132589 (FLOT2), E.136750 (GAD2), E.160789 (LMNA), E.166329, E.170088 |
| | (TMEM192), E.175946 (KLHL38), E.178163 (ZNF518B), E.182217 (HIST2H4B), |
| | E.184470 (TXNRD2), E.110321 (EIF4G2), E.171861 (RNMTL1), E.065978 (YBX1), |
| | E.115738 (ID2), E.143294 (PRCC), E.158042 (MRPL17), E.169093 (ASMTL), E.090565 |
| | (RAB11FIP3), E.185591 (SP1), E.156304 (SCAF4), E.092978 (GPATCH2), E.100056 |
| | (DGCR14), E.100583 (SAMD15), E.105723 (GSK3A), E.107551 (RASSF4), E.107581 |
| | (EIF3A), E.107890 (ANKRD26), E.110104 (CCDC86), E.112584 (FAM120B), E.113580 |
| | (NR3C1), E.114491 (UMPS), E.137312 (FLOT1), E.137955 (RABGGTB), E.141994 |
| | (DUS3L), E.147044 (CASK), E.152818 (UTRN), E.180667 (YOD1), E.184916 (JAG2), |
| | E.196526 (AFAP1), E.198783 (ZNF830), E.108465 (CDK5RAP3), E.156515 (HK1), |
| | E.036448 (MYOM2), E.061918 (GUCY1B3), E.070785 (EIF2B3), E.116044 (NFE2L2), |
| | E.128311 (TST), E.131473 (ACLY), E.132716 (DCAF8), E.138363 (ATIC), E.166596 |
| | (WDR16), E.170027 (YWHAG), E.174021 (GNG5), E.203879 (GDI1), E.160049 (DFFA), |
| | E.010810 (FYN), E.051596 (THOC3), E.006453 (BAI1-associated protein 2-like 1), |
| | E.126945 (HNRNPH2), E.165695 (AK8), E.069869 (NEDD4), E.111801 (BTN3A3), |
| | E.112232 (KHDRBS2), E.128626 (MRPS12), E.129636 (ITFG1), E.137948 (BRDT), |
| | E.147257 (GPC3), E.155380 (SLC16A1), E.159692 (CTBP1), E.166833 (NAV2), E.172466 |
| | (ZNF24), E.175110 (MRPS22), E.176102 (CSTF3), E.179388 (EGR3), E.185359 (HGS), |
| | E.198001 (IRAK4), E.100603 (SNW1), E.162641 (AKNAD1), E.069712 (KIAA1107), |
| | E.073756 (PTGS2), E.077522 (ACTN2), E.101639 (CEP192), E.106633 (GCK), E.115241 |
| | (PPM1G), E.116649 (SRM), E.120370 (GORAB), E.124143 (ARHGAP40), E.127948 |
| | (POR), E.129315 (CCNT1), E.132646 (PCNA), E.135740 (SLC9A5), E.151726 (ACSL1), |
| | E.154380 (ENAH), E.157103 (SLC6A1), E.163930 (BAP1), E.164488 (DACT2), E.164754 |
| | (RAD21), E.175220 (ARHGAP1), E.180318 (ALX1), E.181234 (TMEM132C), E.197081 |
| | (IGF2R), E.092871 (RFFL), E.163644 (PPM1K), E.171723 (GPHN), E.108953 (YWHAE), |
| | E.072110 (ACTN1), E.077097 (TOP2B), E.090889 (KIF4A), E.114331 (ACAP2), E.114867 |
| | (EIF4G1), E.117593 (DARS2), E.118523 (CTGF), E.120915 (EPHX2), E.134759 (ELP2), |
| | E.138061 (CYP1B1), E.140743 (CDR2), E.151247 (EIF4E), E.152942 (RAD17), E.160685 |
| | (ZBTB7B), E.163923 (RPL39L), E.167642 (SPINT2), E.167996 (FTH1), E.185736 |
| | (ADARB2), E.198841 (KTI12), E.185860 (C1orf110), E.160226 (C21orf2), E.070814 |
| | (TCOF1), E.124749 (COL21A1), E.154639 (CXADR), E.065485 (PDIA5), E.023909 |
| | (GCLM), E.100714 (MTHFD1), E.108387 (SEPT4), E.160867 (FGFR4), E.134684 (YARS), |
| | E.123080 (CDKN2C), E.065548 (ZC3H15), E.116455 (WDR77), E.117448 (AKR1A1), |
| | E.100393 (EP300), E.138160 (KIF11), E.166263 (STXBP4), E.173473 (SMARCC1), |
| | E.124942 (AHNAK), E.174842 (GLMN), E.180198 (RCC1), E.185499 (MUC1), E.143947 |
| | (RPS27A), E.170315 (UBB), E.003402 (CFLAR), E.137055 (PLAA), E.142606 (MMEL1), |
| | E.147697 (GSDMC), E.163110 (PDLIM5), E.135842 (FAM129A), E.160691 (SHC1), |
| | E.197157 (SND1), E.029725 (RABEP1), E.127946 (HIP1), E.001036 (FUCA2), E.109846 |
| | (CRYAB), E.183831 (ANKRD45), E.189283 (FHIT), E.092820 (EZR), E.104067 (TJP1), |
| | E.120159 (C9orf82; CAAP1), E.154864 (PIEZO2), E.196975 (ANXA4), E.105220 (GPI), |
| | E.127914 (AKAP9), E.135870 (RC3H1), E.026508 (CD44), E.089154 (GCN1L1), E.100311 |
| | (PDGFB), E.119383 (PPP2R4), E.075624 (ACTB), E.177409 (SAMD9L), E.177731 (FLII), |
| | E.015676 (NUDCD3), E.146457 (WTAP), E.178950 (GAK), E.167110 (GOLGA2) |
| Prostate vesicle | LAMP2, ACPP, CTNNA1, HEBP2, ISOC2, HNRNPC, HNRNPM, TOMM22, TOM1, |
| | ACO2, KRT18, HSPA9, LMNB1, SPR, PPL, ALDH6A1, HNRNPA2B1, ATXN1, |
| | SMARCA4, ECHS1, PAICS, ILF3, PSME3, COX5B, RAB1A, SCARB2, HADH, ESD, |
| | SORD, ILF2, CALM2, ATP5A1, TGOLN2, ANGPTL4, ALCAM, KRT2, PC, NPM1, |
| | C1orf116, GPC6, ALDH1A3, HIST1H1C, XRCC6, HNRNPAB, PSAP, CDH1, SCAMP2, |
| | VASP, CD9, ATP1B3, HSD17B10, APAF1, EIF2C2, RAB5A, CFL2, FARSA, XPNPEP3, |
| | ENTPD4, APLP2, NUCB1, RAB3D, VEGFA, HPS3, TSNAXIP1, HNRNPL, PSMB7, |
| | GNA12, NONO, FOLH1, PRKAR2A, PHB, HIST3H3, MAP7, VCP, U2AF2, FUS, FKBP5, |
| | NDRG1, ATP1A3, NCL, RPL36, KRT8, C1GALT1C1, FASN, PTBP1, TXNDC16, |
| | DNAJC5, SLC37A2, HNRNPK, VDAC2, PRDX2, TALDO1, USP14, PSMD7, HSPE1, |
| | DNAJB1, YWHAZ, RAB3B, CORO1B, MDH2, HIST1H3A, LAMP1, STC2, DSTN, |
| | SLC20A2, ENPP4, WIZ, HSP90AB1, IDH3B, ECH1, C1QBP, SET, TNFSF18, ITGB7, |
| | SPOCK1, EIF4A2, CCT3, CLDN3, EEF2, LRRC57, RUVBL2, CLDN5, APPL2, TM9SF2, |
| | EIF4A3, DBI, DBF4B, SVIP, CD151, ALOX5, SLC9A3R2, RAB27B, DLG1, ARCN1, |
| | CHCHD3, RAB5B, RPS25, RPL10, DDAH1, HSP90B1, CTNNB1, PSMD2, PKP3, FLNB, |
| | EFTUD2, GLO1, PRKCSH, TMBIM1, SEC31A, TMED10, RPL14, MATR3, APEX1, |
| | B4GALT1, HNRNPA1, CPD, HSPA1A, CAPN1, CHRDL2, SPEN, SDF4, NAPA, |
| | SYNGR2, CHMP3, CNDP2, CCDC64B, SERINC5, VPS37C, DNPEP, CLDN7, KTN1, |
| | SERPINB6, ATP5B, CANX, AKT1, TTBK2, DDX1, DLD, LNPEP, LTBP2, LRPPRC, |
| | EPS8, AZGP1, VPS28, DHCR7, CIB1, DDX39B, HIST1H4B, UGDH, HSPD1, B2M, |
| | TOLLIP, CD276, CYCS, CUL3, GDI2, LLGL2, XRCC5, CTTN, PHGDH, CST3, RBL2, |
| | SLC1A5, CD46, VAMP8, CLTA, ACSL3, MRPS26, SNX9, GLUD1, TMED4, PTPN13, |
| | AP1G1, SYT9, DCTN2, IDH2, GLUD2, TMED9, CLDN4, GM2A, CD2AP, MBD5, |
| | SERBP1, NBL1, PRKACB, GGCT, PRDX6, DHX9, TUBA3E, TUBA1C, TUBA3C, |
| | ERP29, SOD2, KRT19, TUBA3D, AARS, COMT, MUM1L1, CDH5, ECE1, ACAT1, |
| | ENDOD1, TUBA8, ETFB, NME2, CS, VBP1, RAB9A, TXNRD1, LIF, BAIAP2, |
| | HIST1H3H, GRN, HIBADH, H3F3B, CUL4B, HNRNPR, YWHAQ, PKHD1, TUBA1A, |
| | PARK7, ERLIN2, PDIA4, TUBA4A, PRKCD, ANXA3, H3F3A, PTP4A2, PDIA3, ETFA, |
| | CYB5R1, CRTAP, OXSR1, YES1, EPCAM, ARHGDIA, DIABLO, SLC9A3R1, BLVRB, |
| | P4HA1, HIST1H3B, ACTN4, UBC, FH, HIST4H4, TUBA1B, HSD17B4, PIK3CA, FLOT2, |
| | LMNA, TMEM192, HIST2H4B, YBX1, EIF3A, FLOT1, UTRN, HK1, ACLY, ATIC, |
| | YWHAG, GNG5, GDI1, HNRNPH2, NEDD4, BTN3A3, SLC16A1, HGS, ACTN2, SRM, |
| | PCNA, ACSL1, RAD21, ARHGAP1, IGF2R, YWHAE, ACTN1, EIF4G1, EPHX2, EIF4E, |
| | FTH1, CXADR, MTHFD1, AKR1A1, STXBP4, AHNAK, MUC1, RPS27A, UBB, |
| | PDLIM5, FAM129A, SND1, FUCA2, CRYAB, EZR, TJP1, ANXA4, GPI, AKAP9, CD44, |
| | GCN1L1, ACTB, FLII, NUDCD3 |
| Prostate Cancer | EGFR, GLUD2, ANXA3, APLP2, BclG, Coiflin 2/cfL2, DCTN-50/DCTN2, DDAH1, |
| vesicles | ESD, FARSLA, GITRL, PRKCSH, SLC20A2, Synaptogyrin 2/SYNGR2, TM9SF2, |
| | Calnexin, TOMM22, NDRG1, RPL10, RPL14, USP14, VDAC2, LLGL2, CD63, CD81, |
| | uPAR/CD87, ADAM 9, BDKRB2, CCR5, CCT2 (TCP1-beta), PSMA, PSMA1, HSPB1, |
| | VAMP8, Rab1A, B4GALT1, Aspartyl Aminopeptidase/Dnpep, ATPase Na+/K+ beta |
| | 3/ATP1B3, BDNF, ATPB, beta 2 Microglobulin, Calmodulin 2/CALM2, CD9, XRCC5/ |
| | Ku80, SMARCA4, TOM1, Cytochrome C, Hsp10/HSPE1, COX2/PTGS2, Claudin 4/ |
| | CLDN4, Cytokeratin 8, Cortactin/CTTN, DBF4B/DRF1, ECH1, ECHS1, GOLPH2, ETS1, |
| | DIP13B/appl2, EZH2/KMT6, GSTP1, hK2/Kif2a, IQGAP1, KLK13, Lamp-2, GM2A, |
| | Hsp40/DNAJB1, HADH/HADHSC, Hsp90B, Nucleophosmin, p130/RBL2, PHGDH, |
| | RAB3B, ANXA1, PSMD7, PTBP1, Rab5a, SCARB2, Stanniocalcin 2/STC2, TGN46/ |
| | TGOLN2, TSNAXIP1, ANXA2, CD46, KLK14, IL1alpha, hnRNP C1 + C2, hnRNP A1, |
| | hnRNP A2B1, Claudin 5, CORO1B, Integrin beta 7, CD41, CD49d, CDH2, COX5b, IDH2, |
| | ME1, PhIP, ALDOA, EDNRB/EDN3, MTA1, NKX3-1, TMPRSS2, CD10, CD24, CDH1, |
| | ADAM10, B7H3, CD276, CHRDL2, SPOCK1, VEGFA, BCHE, CD151, CD166/ALCAM, |
| | CSE1L, GPC6, CXCR3, GAL3, GDF15, IGFBP-2, HGF, KLK12, ITGAL, KLK7, KLK9, |
| | MMP 2, MMP 25, MMP10, TNFR1, Notch 1, PAP - same as ACPP, PTPN13/PTPL1, |
| | seprase/FAP, TNFRI, TWEAK, VEGFR2, E-Cadherin, Hsp60, CLDN3—Claudin3, KLK6, |
| | KLK8, EDIL3 (del-1), APE1, MMP 1, MMP3, nAnS, PSP94/MSP/IGBF, PSAP, RPL19, |
| | SET, TGFB, TGM2, TIMP-1, TNFRII, MDH2, PKP1, Cystatin C, Trop2/TACSTD2, CCR2/ |
| | CD192, hnRNP M1-M4, CDKN1A, CGA, Cytokeratin 18, EpoR, GGPS1, FTL (light and |
| | heavy), GM-CSF, HSP90AA1, IDH3B, MKI67/Ki67, LTBP2, KLK1, KLK4, KLK5, LDH- |
| | A, Nav1.7/SCN9A, NRP1/CD304, PIP3/BPNT1, PKP3, CgA, PRDX2, SRVN, ATPase |
| | Na+/K+ alpha 3/ATP1A3, SLC3A2/CD98, U2AF2, TLR4 (CD284), TMPRSS1, TNFα, |
| | uPA, GloI, ALIX, PKM2, FABP5, CAV1, TLR9/CD289, ANXA4, PLEKHC1/Kindlin-2, |
| | CD71/TRFR, MBD5, SPEN/RBM15, LGALS8, SLC9A3R2, ENTPD4, ANGPTL4, p97/ |
| | VCP, TBX5, PTEN, Prohibitin, LSP1, HOXB13, DDX1, AKT1, ARF6, EZR, H3F3A, CIB1, |
| | Ku70 (XRCC6), KLK11, TMBIM6, SYT9, APAF1, CLDN7, MATR3, CD90/THY1, Tollip, |
| | NOTCH4, 14-3-3 zeta/beta, ATP5A1, DLG1, GRP94, FKBP5/FKBP51, LAMP1, |
| | LGALS3BP, GDI2, HSPA1A, NCL, KLK15, Cytokeratin basic, EDN-3, AGR2, KLK10, |
| | BRG1, FUS, Histone H4, hnRNP L, Catenin Alpha 1, hnRNP K (F45)*, MMP7*, DBI*, beta |
| | catenin, CTH, CTNND2, Ataxin 1, Proteasome 20S beta 7, ADE2, EZH2, GSTP1, Lamin |
| | B1, Coatomer Subunit Delta, ERAB, Mortalin, PKM2, IGFBP-3, CTNND1/delta 1-catenin/ |
| | p120-catenin, PKA R2, NONO, Sorbitol Dehydrogenase, Aconitase 2, VASP, Lipoamide |
| | Dehydrogenase, AP1G1, GOLPH2, ALDH6A1, AZGP1, Ago2, CNDP2, Nucleobindin-1, |
| | SerpinB6, RUVBL2, Proteasome 19S 10B, SH3PX1, SPR, Destrin, MDM4, FLNB, FASN, |
| | PSME |
| Prostate Cancer | 14-3-3 zeta/beta, Aconitase 2, ADAM 9, ADAM10, ADE2, AFM, Ago2, AGR2, AKT1, |
| vesicles | ALDH1A3, ALDH6A1, ALDOA, ALIX, ANGPTL4, ANXA1, ANXA2, ANXA3, ANXA3, |
| | ANXA4, AP1G1, APAF1, APE1, APLP2, APLP2, ARF6, Aspartyl Aminopeptidase/Dnpep, |
| | Ataxin 1, ATP5A1, ATPase Na+/K+ alpha 3/ATP1A3, ATPase Na+/K+ beta 3/ATP1B3, |
| | ATPase Na+/K+ beta 3/ATP1B3, ATPB, AZGP1, B4GALT1, B7H3, BCHE, BclG, |
| | BDKRB2, BDNF, BDNF, beta 2 Microglobulin, beta catenin, BRG1, CALM2, Calmodulin 2/ |
| | CALM2, Calnexin, Calpain 1, Catenin Alpha 1, CAV1, CCR2/CD192, CCR5, CCT2 |
| | (TCP1-beta), CD10, CD151, CD166/ALCAM, CD24, CD276, CD41, CD46, CD49d, CD63, |
| | CD71/TRFR, CD81, CD9, CD9, CD90/THY1, CDH1, CDH2, CDKN1A, CGA, CgA, |
| | CHRDL2, CIB1, CIB1, Claudin 4/CLDN4, Claudin 5, CLDN3, CLDN3—Claudin3, CLDN4, |
| | CLDN7, CNDP2, Coatomer Subunit Delta, Cofilin 2/cfL2, CORO1B, Cortactin/CTTN, |
| | COX2/PTGS2, COX5b, CSE1L, CTH, CTNND1/delta 1-catenin/p120-catenin, |
| | CTNND2, CXCR3, CYCS, Cystatin C, Cytochrome C, Cytokeratin 18, Cytokeratin 8, |
| | Cytokeratin basic, DBF4B/DRF1, DBI*, DCTN-50/DCTN2, DDAH1, DDAH1, DDX1, |
| | Destrin, DIP13B/appl2, DIP13B/appl2, DLG1, Dnpep, E-Cadherin, ECH1, ECHS1, |
| | ECHS1, EDIL3 (del-1), EDN-3, EDNRB/EDN3, EGFR, EIF4A3, ENTPD4, EpoR, EpoR, |
| | ERAB, ESD, ESD, ETS1, ETS1, ETS-2, EZH2, EZH2/KMT6, EZR, FABP5, FARSLA, |
| | FASN, FKBP5/FKBP51, FLNB, FTL (light and heavy), FUS, GAL3, gamma-catenin, |
| | GDF15, GDI2, GGPS1, GGPS1, GITRL, GloI, GLUD2, GM2A, GM-CSF, |
| | GOLM1/GOLPH2 Mab; clone 3B10, GOLPH2, GOLPH2, GPC6, GRP94, GSTP1, GSTP1, |
| | H3F3A, HADH/HADHSC, HGF, HIST1H3A, Histone H4, hK2/Kif2a, hnRNP A1, hnRNP |
| | A2B1, hnRNP C1 + C2, hnRNP K (F45)*, hnRNP L, hnRNP M1-M4, HOXB13, Hsp10/ |
| | HSPE1, Hsp40/DNAJB1, Hsp60, HSP90AA1, Hsp90B, HSPA1A, HSPB1, IDH2, IDH3B, |
| | IDH3B, IGFBP-2, IGFBP-3, IgG1, IgG2A, IgG2B, IL1alpha, IL1alpha, Integrin beta 7, |
| | IQGAP1, ITGAL, KLHL12/C3IP1, KLK1, KLK10, KLK11, KLK12, KLK13, KLK14, |
| | KLK15, KLK4, KLK5, KLK6, KLK7, KLK8, KLK9, Ku70 (XRCC6), Lamin B1, LAMP1, |
| | Lamp-2, LDH-A, LGALS3BP, LGALS8, Lipoamide Dehydrogenase, LLGL2, LSP1, LSP1, |
| | LTBP2, MATR3, MBD5, MDH2, MDM4, ME1, MKI67/Ki67, MMP 1, MMP 2, MMP 25, |
| | MMP10, MMP-14/MT1-MMP, MMP3, MMP7*, Mortalin, MTA1, nAnS, nAnS, |
| | Nav1.7/SCN9A, NCL, NDRG1, NKX3-1, NONO, Notch1, NOTCH4, NRP1/CD304, |
| | Nucleobindin-1, Nucleophosmin, p130/RBL2, p97/VCP, PAP - same as ACPP, PHGDH, |
| | PhIP, PIP3/BPNT1, PKA R2, PKM2, PKM2, PKP1, PKP3, PLEKHC1/Kindlin-2, PRDX2, |
| | PRKCSH, Prohibitin, Proteasome 19S 10B, Proteasome 20S beta 7, PSAP, PSMA, PSMA1, |
| | PSMA1, PSMD7, PSMD7, PSME3, PSP94/MSP/IGBF, PTBP1, PTEN, PTPN13/PTPL1, |
| | Rab1A, RAB3B, Rab5a, Rad51b, RPL10, RPL10, RPL14, RPL14, RPL19, RUVBL2, |
| | SCARB2, seprase/FAP, SerpinB6, SET, SH3PX1, SLC20A2, SLC3A2/CD98, SLC9A3R2, |
| | SMARCA4, Sorbitol Dehydrogenase, SPEN/RBM15, SPOCK1, SPR, SRVN, Stanniocalcin |
| | 2/STC2, STEAP1, Synaptogyrin 2/SYNGR2, Syndecan, SYNGR2, SYT9, TAF1B/ |
| | GRHL1, TBX5, TGFB, TGM2, TGN46/TGOLN2, TIMP-1, TLR3, TLR4 (CD284), TLR9/ |
| | CD289, TM9SF2, TMBIM6, TMPRSS1, TMPRSS2, TNFR1, TNFRI, TNFRII, TNFSF18/ |
| | GITRL, TNFα, TNFα, Tollip, TOM1, TOMM22, Trop2/TACSTD2, TSNAXIP1, TWEAK, |
| | U2AF2, uPA, uPAR/CD87, USP14, USP14, VAMP8, VASP, VDAC2, VEGFA, |
| | VEGFR1/FLT1, VEGFR2, VPS28, XRCC5/Ku80, XRCC5/Ku80 |
| Prostate Vesicles/ | EpCAM/TROP-1, HSA, Fibrinogen, GAPDH, Cholesterol Oxidase, MMP7, Complement |
| General Vesicles | Factor D/Adipsin, E-Cadherin, Transferrin Antibody, eNOS, IgM, CD9, Apolipoprotein B |
| | (Apo B), Ep-CAM, TBG, Kallekerin 3, IgA, IgG, Annexin V, IgG, Pyruvate Carboxylase, |
| | trypsin, AFP, TNF RI/TNFRSF1A, Aptamer CAR023, Aptamer CAR024, Aptamer CAR025, |
| | Aptamer CAR026 |
| Ribonucleoprotein | GW182, Ago2, miR-let-7a, miR-16, miR-22, miR-148a, miR-451, miR-92a, CD9, CD63, |
| complexes & | CD81 |
| vesicles | |
| Prostate Cancer | PCSA, Muc2, Adam10 |
| vesicles | |
| Prostate Cancer | Alkaline Phosphatase (AP), CD63, MyoD1, Neuron Specific Enolase, MAP1B, CNPase, |
| vesicles | Prohibitin, CD45RO, Heat Shock Protein 27, Collagen II, Laminin B1/b1, Gai1, CDw75, bcl- |
| | XL, Laminin-s, Ferritin, CD21, ADP-ribosylation Factor (ARF-6) |
| Prostate Cancer | CD56/NCAM-1, Heat Shock Protein 27/hsp27, CD45RO, MAP1B, MyoD1, |
| vesicles | CD45/T200/LCA, CD3zeta, Laminin-s, bcl-XL, Rad18, Gai1, Thymidylate Synthase, |
| | Alkaline Phosphatase (AP), CD63, MMP-16/MT3-MMP, Cyclin C, Neuron Specific |
| | Enolase, SIRP a1, Laminin B1/b1, Amyloid Beta (APP), SODD (Silencer of Death Domain), |
| | CDC37, Gab-1, E2F-2, CD6, Mast Cell Chymase, Gamma Glutamylcysteine Synthetase |
| | (GCS) |
| Prostate Cancer | EpCAM, MMP7, PCSA, BCNP, ADAM10, KLK2, SPDEF, CD81, MFGE8, IL-8 |
| vesicles | |
| Prostate Cancer | EpCAM, KLK2, PBP, SPDEF, SSX2, SSX4 |
| vesicles | |
| Prostate Cancer | ADAM-10, BCNP, CD9, EGFR, EpCam, IL1B, KLK2, MMP7, p53, PBP, PCSA, |
| vesicles | SERPINB3, SPDEF, SSX2, SSX4 |
| Androgen Receptor | GTF2F1, CTNNB1, PTEN, APPL1, GAPDH, CDC37, PNRC1, AES, UXT, RAN, PA2G4, |
| (AR) pathway | JUN, BAG1, UBE2I, HDAC1, COX5B, NCOR2, STUB1, HIPK3, PXN, NCOA4 |
| members in cMVs | |
| EGFR1 pathway | RALBP1, SH3BGRL, RBBP7, REPS1, SNRPD2, CEBPB, APPL1, MAP3K3, EEF1A1, |
| members in cMVs | GRB2, RAC1, SNCA, MAP2K3, CEBPA, CDC42, SH3KBP1, CBL, PTPN6, YWHAB, |
| | FOXO1, JAK1, KRT8, RALGDS, SMAD2, VAV1, NDUFA13, PRKCB1, MYC, JUN, |
| | RFXANK, HDAC1, HIST3H3, PEBP1, PXN, TNIP1, PKN2 |
| TNF-alpha | BCL3, SMARCE1, RPS11, CDC37, RPL6, RPL8, PAPOLA, PSMC1, CASP3, AKT2, |
| pathway members | MAP3K7IP2, POLR2L, TRADD, SMARCA4, HIST3H3, GNB2L1, PSMD1, PEBP1, |
| in cMVs | HSPB1, TNIP1, RPS13, ZFAND5, YWHAQ, COMMD1, COPS3, POLR1D, SMARCC2, |
| | MAP3K3, BIRC3, UBE2D2, HDAC2, CASP8, MCM7, PSMD7, YWHAG, NFKBIA, |
| | CAST, YWHAB, G3BP2, PSMD13, FBL, RELB, YWHAZ, SKP1, UBE2D3, PDCD2, |
| | HSP90AA1, HDAC1, KPNA2, RPL30, GTF2I, PFDN2 |
| Colorectal cancer | CD9, EGFR, NGAL, CD81, STEAP, CD24, A33, CD66E, EPHA2, Ferritin, GPR30, |
| | GPR110, MMP9, OPN, p53, TMEM211, TROP2, TGM2, TIMP, EGFR, DR3, UNC93A, |
| | MUC17, EpCAM, MUC1, MUC2, TSG101, CD63, B7H3 |
| Colorectal cancer | DR3, STEAP, epha2, TMEM211, unc93A, A33, CD24, NGAL, EpCam, MUC17, TROP2, |
| | TETS |
| Colorectal cancer | A33, AFP, ALIX, ALX4, ANCA, APC, ASCA, AURKA, AURKB, B7H3, BANK1, BCNP, |
| | BDNF, CA-19-9, CCSA-2, CCSA-3&4, CD10, CD24, CD44, CD63, CD66 CEA, CD66e |
| | CEA, CD81, CD9, CDA, C-Erb2, CRMP-2, CRP, CRTN, CXCL12, CYFRA21-1, DcR3, |
| | DLL4, DR3, EGFR, Epcam, EphA2, FASL, FRT, GAL3, GDF15, GPCR (GPR110), GPR30, |
| | GRO-1, HBD 1, HBD2, HNP1-3, IL-1B, IL8, IMP3, L1CAM, LAMN, MACC-1, |
| | MGC20553, MCP-1, M-CSF, MIC1, MIF, MMP7, MMP9, MS4A1, MUC1, MUC17, |
| | MUC2, Ncam, NGAL, NNMT, OPN, p53, PCSA, PDGFRB, PRL, PSMA, PSME3, Reg IV, |
| | SCRN1, Sept-9, SPARC, SPON2, SPR, SRVN, TFF3, TGM2, TIMP-1, TMEM211, TNF- |
| | alpha, TPA, TPS, Trail-R2, Trail-R4, TrKB, TROP2, Tsg 101, TWEAK, UNC93A, VEGFA |
| Colorectal cancer | miR 92, miR 21, miR 9, miR 491 |
| Colorectal cancer | miR-127-3p, miR-92a, miR-486-3p, miR-378 |
| Colorectal cancer | TMEM211, MUC1, CD24 and/or GPR110 (GPCR 110) |
| Colorectal cancer | hsa-miR-376c, hsa-miR-215, hsa-miR-652, hsa-miR-582-5p, hsa-miR-324-5p, hsa-miR- |
| | 1296, hsa-miR-28-5p, hsa-miR-190, hsa-miR-590-5p, hsa-miR-202, hsa-miR-195 |
| Colorectal cancer | A26C1A, A26C1B, A2M, ACAA2, ACE, ACOT7, ACP1, ACTA1, ACTA2, ACTB, |
| vesicle markers | ACTBL2, ACTBL3, ACTC1, ACTG1, ACTG2, ACTN1, ACTN2, ACTN4, ACTR3, |
| | ADAM10, ADSL, AGR2, AGR3, AGRN, AHCY, AHNAK, AKR1B10, ALB, ALDH16A1, |
| | ALDH1A1, ALDOA, ANXA1, ANXA11, ANXA2, ANXA2P2, ANXA4, ANXA5, ANXA6, |
| | AP2A1, AP2A2, APOA1, ARF1, ARF3, ARF4, ARF5, ARF6, ARHGDIA, ARPC3, |
| | ARPC5L, ARRDC1, ARVCF, ASCC3L1, ASNS, ATP1A1, ATP1A2, ATP1A3, ATP1B1, |
| | ATP4A, ATP5A1, ATP5B, ATP5I, ATP5L, ATP5O, ATP6AP2, B2M, BAIAP2, |
| | BAIAP2L1, BRI3BP, BSG, BUB3, C1orf58, C5orf32, CAD, CALM1, CALM2, CALM3, |
| | CAND1, CANX, CAPZA1, CBR1, CBR3, CCT2, CCT3, CCT4, CCT5, CCT6A, CCT7, |
| | CCT8, CD44, CD46, CD55, CD59, CD63, CD81, CD82, CD9, CDC42, CDH1, CDH17, |
| | CEACAM5, CFL1, CFL2, CHMP1A, CHMP2A, CHMP4B, CKB, CLDN3, CLDN4, |
| | CLDN7, CLIC1, CLIC4, CLSTN1, CLTC, CLTCL1, CLU, COL12A1, COPB1, COPB2, |
| | CORO1C, COX4I1, COX5B, CRYZ, CSPG4, CSRP1, CST3, CTNNA1, CTNNB1, |
| | CTNND1, CTTN, CYFIP1, DCD, DERA, DIP2A, DIP2B, DIP2C, DMBT1, DPEP1, DPP4, |
| | DYNC1H1, EDIL3, EEF1A1, EEF1A2, EEF1AL3, EEF1G, EEF2, EFNB1, EGFR, EHD1, |
| | EHD4, EIF3EIP, EIF3I, EIF4A1, EIF4A2, ENO1, ENO2, ENO3, EPHA2, EPHA5, EPHB1, |
| | EPHB2, EPHB3, EPHB4, EPPK1, ESD, EZR, F11R, F5, F7, FAM125A, FAM125B, |
| | FAM129B, FASLG, FASN, FAT, FCGBP, FER1L3, FKBP1A, FLNA, FLNB, FLOT1, |
| | FLOT2, G6PD, GAPDH, GARS, GCN1L1, GDI2, GK, GMDS, GNA13, GNAI2, GNAI3, |
| | GNAS, GNB1, GNB2, GNB2L1, GNB3, GNB4, GNG12, GOLGA7, GPA33, GPI, |
| | GPRC5A, GSN, GSTP1, H2AFJ, HADHA, hCG_1757335, HEPH, HIST1H2AB, |
| | HIST1H2AE, HIST1H2AJ, HIST1H2AK, HIST1H4A, HIST1H4B, HIST1H4C, HIST1H4D, |
| | HIST1H4E, HIST1H4F, HIST1H4H, HIST1H4I, HIST1H4J, HIST1H4K, HIST1H4L, |
| | HIST2H2AC, HIST2H4A, HIST2H4B, HIST3H2A, HIST4H4, HLA-A, HLA-A29.1, HLA- |
| | B, HLA-C, HLA-E, HLA-H, HNRNPA2B1, HNRNPH2, HPCAL1, HRAS, HSD17B4, |
| | HSP90AA1, HSP90AA2, HSP90AA4P, HSP90AB1, HSP90AB2P, HSP90AB3P, HSP90B1, |
| | HSPA1A, HSPA1B, HSPA1L, HSPA2, HSPA4, HSPA5, HSPA6, HSPA7, HSPA8, HSPA9, |
| | HSPD1, HSPE1, HSPG2, HYOU1, IDH1, IFITM1, IFITM2, IFITM3, IGH@, IGHG1, |
| | IGHG2, IGHG3, IGHG4, IGHM, IGHV4-31, IGK@, IGKC, IGKV1-5, IGKV2-24, IGKV3- |
| | 20, IGSF3, IGSF8, IQGAP1, IQGAP2, ITGA2, ITGA3, ITGA6, ITGAV, ITGB1, ITGB4, |
| | JUP, KIAA0174, KIAA1199, KPNB1, KRAS, KRT1, KRT10, KRT13, KRT14, KRT15, |
| | KRT16, KRT17, KRT18, KRT19, KRT2, KRT20, KRT24, KRT25, KRT27, KRT28, KRT3, |
| | KRT4, KRT5, KRT6A, KRT6B, KRT6C, KRT7, KRT75, KRT76, KRT77, KRT79, KRT8, |
| | KRT9, LAMA5, LAMP1, LDHA, LDHB, LFNG, LGALS3, LGALS3BP, LGALS4, LIMA1, |
| | LIN7A, LIN7C, LOC100128936, LOC100130553, LOC100133382, LOC100133739, |
| | LOC284889, LOC388524, LOC388720, LOC442497, LOC653269, LRP4, LRPPRC, |
| | LRSAM1, LSR, LYZ, MAN1A1, MAP4K4, MARCKS, MARCKSL1, METRNL, MFGE8, |
| | MICA, MIF, MINK1, MITD1, MMP7, MOBKL1A, MSN, MTCH2, MUC13, MYADM, |
| | MYH10, MYH11, MYH14, MYH9, MYL6, MYL6B, MYO1C, MYO1D, NARS, NCALD, |
| | NCSTN, NEDD4, NEDD4L, NME1, NME2, NOTCH1, NQO1, NRAS, P4HB, PCBP1, |
| | PCNA, PCSK9, PDCD6, PDCD6IP, PDIA3, PDXK, PEBP1, PFN1, PGK1, PHB, PHB2, |
| | PKM2, PLEC1, PLEKHB2, PLSCR3, PLXNA1, PLXNB2, PPIA, PPIB, PPP2R1A, PRDX1, |
| | PRDX2, PRDX3, PRDX5, PRDX6, PRKAR2A, PRKDC, PRSS23, PSMA2, PSMC6, |
| | PSMD11, PSMD3, PSME3, PTGFRN, PTPRF, PYGB, QPCT, QSOX1, RAB10, RAB11A, |
| | RAB11B, RAB13, RAB14, RAB15, RAB1A, RAB1B, RAB2A, RAB33B, RAB35, RAB43, |
| | RAB4B, RAB5A, RAB5B, RAB5C, RAB6A, RAB6B, RAB7A, RAB8A, RAB8B, RAC1, |
| | RAC3, RALA, RALB, RAN, RANP1, RAP1A, RAP1B, RAP2A, RAP2B, RAP2C, RDX, |
| | REG4, RHOA, RHOC, RHOG, ROCK2, RP11-631M21.2, RPL10A, RPL12, RPL6, RPL8, |
| | RPLP0, RPLP0-like, RPLP1, RPLP2, RPN1, RPS13, RPS14, RPS15A, RPS16, RPS18, |
| | RPS20, RPS21, RPS27A, RPS3, RPS4X, RPS4Y1, RPS4Y2, RPS7, RPS8, RPSA, |
| | RPSAP15, RRAS, RRAS2, RUVBL1, RUVBL2, S100A10, S100A11, S100A14, S100A16, |
| | S100A6, S100P, SDC1, SDC4, SDCBP, SDCBP2, SERINC1, SERINC5, SERPINA1, |
| | SERPINF1, SETD4, SFN, SLC12A2, SLC12A7, SLC16A1, SLC1A5, SLC25A4, SLC25A5, |
| | SLC25A6, SLC29A1, SLC2A1, SLC3A2, SLC44A1, SLC7A5, SLC9A3R1, SMPDL3B, |
| | SNAP23, SND1, SOD1, SORT1, SPTAN1, SPTBN1, SSBP1, SSR4, TACSTD1, TAGLN2, |
| | TBCA, TCEB1, TCP1, TF, TFRC, THBS1, TJP2, TKT, TMED2, TNFSF10, TNIK, |
| | TNKS1BP1, TNPO3, TOLLIP, TOMM22, TPI1, TPM1, TRAP1, TSG101, TSPAN1, |
| | TSPAN14, TSPAN15, TSPAN6, TSPAN8, TSTA3, TTYH3, TUBA1A, TUBA1B, |
| | TUBA1C, TUBA3C, TUBA3D, TUBA3E, TUBA4A, TUBA4B, TUBAS, TUBB, TUBB2A, |
| | TUBB2B, TUBB2C, TUBB3, TUBB4, TUBB4Q, TUBB6, TUFM, TXN, UBA1, UBA52, |
| | UBB, UBC, UBE2N, UBE2V2, UGDH, UQCRC2, VAMP1, VAMP3, VAMP8, VCP, VIL1, |
| | VPS25, VPS28, VPS35, VPS36, VPS37B, VPS37C, WDR1, YWHAB, YWHAE, YWHAG, |
| | YWHAH, YWHAQ, YWHAZ |
| Colorectal Cancer | hsa-miR-16, hsa-miR-25, hsa-miR-125b, hsa-miR-451, hsa-miR-200c, hsa-miR-140-3p, hsa- |
| | miR-658, hsa-miR-370, hsa-miR-1296, hsa-miR-636, hsa-miR-502-5p |
| Breast cancer | miR-21, miR-155, miR-206, miR-122a, miR-210, miR-21, miR-155, miR-206, miR-122a, |
| | miR-210, let-7, miR-10b, miR-125a, miR-125b, miR-145, miR-143, miR-145, miR-1b |
| Breast cancer | GAS5 |
| Breast cancer | ER, PR, HER2, MUC1, EGFR, KRAS, B-Raf, CYP2D6, hsp70, MART-1, TRP, HER2, |
| | hsp70, MART-1, TRP, HER2, ER, PR, Class III b-tubulin, VEGFA, ETV6-NTRK3, BCA- |
| | 225, hsp70, MART1, ER, VEGFA, Class III b-tubulin, HER2/neu (e.g., for Her2+ breast |
| | cancer), GPR30, ErbB4 (JM) isoform, MPR8, MISIIR, CD9, EphA2, EGFR, B7H3, PSM, |
| | PCSA, CD63, STEAP, CD81, ICAM1, A33, DR3, CD66e, MFG-E8, TROP-2, |
| | Mammaglobin, Hepsin, NPGP/NPFF2, PSCA, 5T4, NGAL, EpCam, neurokinin receptor-1 |
| | (NK-1 or NK-1R), NK-2, Pai-1, CD45, CD10, HER2/ERBB2, AGTR1, NPY1R, MUC1, |
| | ESA, CD133, GPR30, BCA225, CD24, CA15.3 (MUC1 secreted), CA27.29 (MUC1 |
| | secreted), NMDAR1, NMDAR2, MAGEA, CTAG1B, NY-ESO-1, SPB, SPC, NSE, PGP9.5, |
| | progesterone receptor (PR) or its isoform (PR(A) or PR(B)), P2RX7, NDUFB7, NSE, GAL3, |
| | osteopontin, CHI3L1, IC3b, mesothelin, SPA, AQP5, GPCR, hCEA-CAM, PTP IA-2, |
| | CABYR, TMEM211, ADAM28, UNC93A, MUC17, MUC2, IL10R-beta, BCMA, |
| | HVEM/TNFRSF14, Trappin-2, Elafin, ST2/IL1 R4, TNFRF14, CEACAM1, TPA1, LAMP, |
| | WF, WH1000, PECAM, BSA, TNFR |
| Breast cancer | CD9, MIS Rii, ER, CD63, MUC1, HER3, STAT3, VEGFA, BCA, CA125, CD24, EPCAM, |
| | ERB B4 |
| Breast cancer | CD10, NPGP/NPFF2, HER2/ERBB2, AGTR1, NPY1R, neurokinin receptor-1 (NK-1 or NK- |
| | 1R), NK-2, MUC1, ESA, CD133, GPR30, BCA225, CD24, CA15.3 (MUC1 secreted), |
| | CA27.29 (MUC1 secreted), NMDAR1, NMDAR2, MAGEA, CTAG1B, NY-ESO-1 |
| Breast cancer | SPB, SPC, NSE, PGP9.5, CD9, P2RX7, NDUFB7, NSE, GAL3, osteopontin, CHI3L1, |
| | EGFR, B7H3, IC3b, MUC1, mesothelin, SPA, PCSA, CD63, STEAP, AQP5, CD81, DR3, |
| | PSM, GPCR, EphA2, hCEA-CAM, PTP IA-2, CABYR, TMEM211, ADAM28, UNC93A, |
| | A33, CD24, CD10, NGAL, EpCam, MUC17, TROP-2, MUC2, IL10R-beta, BCMA, |
| | HVEM/TNFRSF14, Trappin-2 Elafin, ST2/IL1 R4, TNFRF14, CEACAM1, TPA1, LAMP, |
| | WF, WH1000, PECAM, BSA, TNFR |
| Breast cancer | BRCA, MUC-1, MUC 16, CD24, ErbB4, ErbB2 (HER2), ErbB3, HSP70, Mammaglobin, |
| | PR, PR(B), VEGFA |
| Breast cancer | CD9, HSP70, Gal3, MIS, EGFR, ER, ICB3, CD63, B7H4, MUC1, DLL4, CD81, ERB3, |
| | VEGF, BCA225, BRCA, CA125, CD174, CD24, ERB2, NGAL, GPR30, CYFRA21, CD31, |
| | cMET, MUC2, ERBB4 |
| Breast cancer | CD9, EphA2, EGFR, B7H3, PSMA, PCSA, CD63, STEAP, CD81, STEAP1, ICAM1 |
| | (CD54), PSMA, A33, DR3, CD66e, MFG-8e, TMEM211, TROP-2, EGFR, Mammoglobin, |
| | Hepsin, NPGP/NPFF2, PSCA, 5T4, NGAL, NK-2, EpCam, NK-1R, PSMA, 5T4, PAI-1, |
| | CD45 |
| Breast cancer | PGP9.5, CD9, HSP70, gal3-b2c10, EGFR, iC3b, PSMA, PCSA, CD63, MUC1, DLL4, |
| | CD81, B7-H3, HER 3 (ErbB3), MART-1, PSA, VEGF A, TIMP-1, GPCR GPR110, EphA2, |
| | MMP9, mmp7, TMEM211, UNC93a, BRCA, CA125 (MUC16), Mammaglobin, CD174 |
| | (Lewis y), CD66e CEA, CD24 c.sn3, C-erbB2, CD10, NGAL, epcam, CEA |
| | (carcinoembryonic Antigen), GPR30, CYFRA21-1, OPN, MUC17, hVEGFR2, MUC2, |
| | NCAM, ASPH, ErbB4, SPB, SPC, CD9, MS4A1, EphA2, MIS RII, HER2 (ErbB2), ER, PR |
| | (B), MRP8, CD63, B7H4, TGM2, CD81, DR3, STAT 3, MACC-1, TrKB, IL 6 Unc, OPG - |
| | 13, IL6R, EZH2, SCRN1, TWEAK, SERPINB3, CDAC1, BCA-225, DR3, A33, |
| | NPGP/NPFF2, TIMP1, BDNF, FRT, Ferritin heavy chain, seprase, p53, LDH, HSP, ost, p53, |
| | CXCL12, HAP, CRP, Gro-alpha, Tsg 101, GDF15 |
| Breast cancer | CD9, HSP70, Gal3, MIS (RII), EGFR, ER, ICB3, CD63, B7H4, MUC1, CD81, ERB3, |
| | MART1, STAT3, VEGF, BCA225, BRCA, CA125, CD174, CD24, ERB2, NGAL, GPR30, |
| | CYFRA21, CD31, cMET, MUC2, ERB4, TMEM211 |
| Breast Cancer | 5T4 (trophoblast), ADAM10, AGER/RAGE, APC, APP (β-amyloid), ASPH (A-10), B7H3 |
| | (CD276), BACE1, BAI3, BRCA1, BDNF, BIRC2, C1GALT1, CA125 (MUC16), |
| | Calmodulin 1, CCL2 (MCP-1), CD9, CD10, CD127 (IL7R), CD174, CD24, CD44, CD63, |
| | CD81, CEA, CRMP-2, CXCR3, CXCR4, CXCR6, CYFRA 21, derlin 1, DLL4, DPP6, E- |
| | CAD, EpCaM, EphA2 (H-77), ER(1) ESR1 α, ER(2) ESR2 β, Erb B4, Erbb2, erb3 (Erb-B3), |
| | PA2G4, FRT (FLT1), Gal3, GPR30 (G-coupled ER1), HAP1, HER3, HSP-27, HSP70, IC3b, |
| | IL8, insig, junction plakoglobin, Keratin 15, KRAS, Mammaglobin, MART1, MCT2, |
| | MFGE8, MMP9, MRP8, Muc1, MUC17, MUC2, NCAM, NG2 (CSPG4), Ngal, NHE-3, |
| | NT5E (CD73), ODC1, OPG, OPN, p53, PARK7, PCSA, PGP9.5 (PARK5), PR(B), PSA, |
| | PSMA, RAGE, STXBP4, Survivin, TFF3 (secreted), TIMP1, TIMP2, TMEM211, TRAF4 |
| | (scaffolding), TRAIL-R2 (death Receptor 5), TrkB, Tsg 101, UNC93a, VEGF A, VEGFR2, |
| | YB-1, VEGFR1, GCDPF-15 (PIP), BigH3 (TGFb1-induced protein), 5HT2B (serotonin |
| | receptor 2B), BRCA2, BACE 1, CDH1—cadherin |
| Breast Cancer | AK5.2, ATP6V1B1, CRABP1 |
| Breast Cancer | DST.3, GATA3, KRT81 |
| Breast Cancer | AK5.2, ATP6V1B1, CRABP1, DST.3, ELF5, GATA3, KRT81, LALBA, OXTR, RASL10A, |
| | SERHL, TFAP2A.1, TFAP2A.3, TFAP2C, VTCN1 |
| Breast Cancer | TRAP; Renal Cell Carcinoma; Filamin; 14.3.3, Pan; Prohibitin; c-fos; Ang-2; GSTmu; Ang- |
| | 1; FHIT; Rad51; Inhibin alpha; Cadherin-P; 14.3.3 gamma; p18INK4c; P504S; XRCC2; |
| | Caspase 5; CREB-Binding Protein; Estrogen Receptor; IL17; Claudin 2; Keratin 8; GAPDH; |
| | CD1; Keratin, LMW; Gamma Glutamylcysteine Synthetase(GCS)/Glutamate-cysteine |
| | Ligase; a-B-Crystallin; Pax-5; MMP-19; APC; IL-3; Keratin 8 (phospho-specific Ser73); |
| | TGF-beta 2; ITK; Oct-2/; DJ-1; B7-H2; Plasma Cell Marker; Rad18; Estriol; Chk1; Prolactin |
| | Receptor; Laminin Receptor; Histone H1; CD45RO; GnRH Receptor; IP10/CRG2; Actin, |
| | Muscle Specific; S100; Dystrophin; Tubulin-a; CD3zeta; CDC37; GABA a Receptor 1; |
| | MMP-7 (Matrilysin); Heregulin; Caspase 3; CD56/NCAM-1; Gastrin 1; SREBP-1 (Sterol |
| | Regulatory Element Binding Protein-1); MLH1; PGP9.5; Factor VIII Related Antigen; ADP- |
| | ribosylation Factor (ARF-6); MHC II (HLA-DR) Ia; Survivin; CD23; G-CSF; CD2; |
| | kDa Calretinin; Neuron Specific Enolase; CD165; Calponin; CD95/Fas; Urocortin; Heat Shock |
| | Protein 27/hsp27; Topo II beta; Insulin Receptor; Keratin 5/8; sm; Actin, skeletal muscle; |
| | CA19-9; GluR1; GRIP1; CD79a mb-1; TdT; HRP; CD94; CCK-8; Thymidine |
| | Phosphorylase; CD57; Alkaline Phosphatase (AP); CD59/MACIF/MIRL/Protectin; |
| | GLUT-1; alpha-1-antitrypsin; Presenillin; Mucin 3 (MUC3); pS2; 14-3-3 beta; MMP-13 |
| | (Collagenase-3); Fli-1; mGluRS; Mast Cell Chymase; Laminin B1/b1; Neurofilament |
| | (160 kDa); CNPase; Amylin Peptide; Gai1; CD6; alpha-1-antichymotrypsin; E2F-2; MyoD1 |
| Ductal carcinoma | Laminin B1/b1; E2F-2; TdT; Apolipoprotein D; Granulocyte; Alkaline Phosphatase (AP); |
| in situ (DCIS) | Heat Shock Protein 27/hsp27; CD95/Fas; pS2; Estriol; GLUT-1; Fibronectin; CD6; CCK-8; |
| | sm; Factor VIII Related Antigen; CD57; Plasminogen; CD71/Transferrin Receptor; Keratin |
| | 5/8; Thymidine Phosphorylase; CD45/T200/LCA; Epithelial Specific Antigen; Macrophage; |
| | CD10; MyoD1; Gai1; bcl-XL; hPL; Caspase 3; Actin, skeletal muscle; IP10/CRG2; GnRH |
| | Receptor; p35nck5a; ADP-ribosylation Factor (ARF-6); Cdk4 ; alpha-1-antitrypsin; IL17; |
| | Neuron Specific Enolase; CD56/NCAM-1; Prolactin Receptor; Cdk7; CD79a mb-1; Collagen |
| | IV; CD94; Myeloid Specific Marker; Keratin 10; Pax-5; IgM (m-Heavy Chain); CD45RO; |
| | CA19-9; Mucin 2; Glucagon; Mast Cell Chymase; MLH1; CD1; CNPase; Parkin; MHC II |
| | (HLA-DR) Ia; B7-H2; Chk1; Lambda Light Chain; MHC II (HLA-DP and DR); Myogenin; |
| | MMP-7 (Matrilysin); Topo II beta; CD53; Keratin 19; Rad18; Ret Oncoprotein; MHC II |
| | (HLA-DP); E3-binding protein (ARM1); Progesterone Receptor; Keratin 8; IgG; IgA; |
| | Tubulin; Insulin Receptor Substrate-1; Keratin 15; DR3; IL-3; Keratin 10/13; Cyclin D3; |
| | MHC I (HLA25 and HLA-Aw32); Calmodulin; Neurofilament (160 kDa) |
| Ductal carcinoma | Macrophage; Fibronectin; Granulocyte; Keratin 19; Cyclin D3; CD45/T200/LCA; EGFR; |
| in situ (DCIS) v. | Thrombospondin; CD81/TAPA-1; Ruv C; Plasminogen; Collagen IV; Laminin B1/b1; CD10; |
| other Breast cancer | TdT; Filamin; bcl-XL; 14.3.3 gamma; 14.3.3, Pan; p170; Apolipoprotein D; CD71/ |
| | Transferrin Receptor; FHIT |
| Breast cancer | 5HT2B, 5T4 (trophoblast), ACO2, ACSL3, ACTN4, ADAM10, AGR2, AGR3, ALCAM, |
| | ALDH6A1, ANGPTL4, ANO9, AP1G1, APC, APEX1, APLP2, APP (_-amyloid), ARCN1, |
| | ARHGAP35, ARL3, ASAH1, ASPH (A-10), ATP1B1, ATP1B3, ATP5I, ATP5O, ATXN1, |
| | B7H3, BACE1, BAI3, BAIAP2, BCA-200, BDNF, BigH3, BIRC2, BLVRB, BRCA, BST2, |
| | C1GALT1, C1GALT1C1, C20orf3, CA125, CACYBP, Calmodulin, CAPN1, CAPNS1, |
| | CCDC64B, CCL2 (MCP-1), CCT3, CD10(BD), CD127 (IL7R), CD174, CD24, CD44, |
| | CD80, CD86, CDH1, CDH5, CEA, CFL2, CHCHD3, CHMP3, CHRDL2, CIB1, CKAP4, |
| | COPA, COX5B, CRABP2, CRIP1, CRISPLD1, CRMP-2, CRTAP, CTLA4, CUL3, CXCR3, |
| | CXCR4, CXCR6, CYB5B, CYB5R1, CYCS, CYFRA 21, DBI, DDX23, DDX39B, derlin 1, |
| | DHCR7, DHX9, DLD, DLL4, DNAJB1, DPP6, DSTN, eCadherin, EEF1D, EEF2, EFTUD2, |
| | EIF4A2, EIF4A3, EpCaM, EphA2, ER(1) ESR1_, ER(2) ESR2_, Erb B4, Erb2, erb3 (Erb- |
| | B3?), ERLIN2, ESD, FARSA, FASN, FEN1, FKBP5, FLNB, FOXP3, FUS, Gal3, GCDPF- |
| | 15, GCNT2, GNA12, GNG5, GNPTG, GPC6, GPD2, GPER (GPR30), GSPT1, H3F3B, |
| | H3F3C, HADH, HAP1, HER3, HIST1H1C, HIST1H2AB, HIST1H3A, HIST1H3C, |
| | HIST1H3D, HIST1H3E, HIST1H3F, HIST1H3G, HIST1H3H, HIST1H3I, HIST1H3J, |
| | HIST2H2BF, HIST2H3A, HIST2H3C, HIST2H3D, HIST3H3, HMGB1, HNRNPA2B1, |
| | HNRNPAB, HNRNPC, HNRNPD, HNRNPH2, HNRNPK, HNRNPL, HNRNPM, |
| | HNRNPU, HPS3, HSP-27, HSP70, HSP90B1, HSPA1A, HSPA2, HSPA9, HSPE1, IC3b, |
| | IDE, IDH3B, IDO1, IFI30, IL1RL2, IL7, IL8, ILF2, ILF3, IQCG, ISOC2, IST1, ITGA7, |
| | ITGB7, junction plakoglobin, Keratin 15, KRAS, KRT19, KRT2, KRT7, KRT8, KRT9, |
| | KTN1, LAMP1, LMNA, LMNB1, LNPEP, LRPPRC, LRRC57, Mammaglobin, MAN1A1, |
| | MAN1A2, MART1, MATR3, MBD5, MCT2, MDH2, MFGE8, MFGE8, MGP, MMP9, |
| | MRP8, MUC1, MUC17, MUC2, MYO5B, MYOF, NAPA, NCAM, NCL, NG2 (CSPG4), |
| | Ngal, NHE-3, NME2, NONO, NPM1, NQO1, NT5E (CD73), ODC1, OPG, OPN (SC), OS9, |
| | p53, PACSIN3, PAICS, PARK7, PARVA, PC, PCNA, PCSA, PD-1, PD-L1, PD-L2, |
| | PGP9.5, PHB, PHB2, PIK3C2B, PKP3, PPL, PR(B)?, PRDX2, PRKCB, PRKCD, PRKDC, |
| | PSA, PSAP, PSMA, PSMB7, PSMD2, PSME3, PYCARD, RAB1A, RAB3D, RAB7A, |
| | RAGE, RBL2, RNPEP, RPL14, RPL27, RPL36, RPS25, RPS4X, RPS4Y1, RPS4Y2, |
| | RUVBL2, SET, SHMT2, SLAIN1, SLC39A14, SLC9A3R2, SMARCA4, SNRPD2, |
| | SNRPD3, SNX33, SNX9, SPEN, SPR, SQSTM1, SSBP1, ST3GAL1, STXBP4, SUB1, |
| | SUCLG2, Survivin, SYT9, TFF3 (secreted), TGOLN2, THBS1, TIMP1, TIMP2, TMED10, |
| | TMED4, TMED9, TMEM211, TOM1, TRAF4 (scaffolding), TRAIL-R2, TRAP1, TrkB, Tsg |
| | 101, TXNDC16, U2AF2, UEVLD, UFC1, UNC93a, USP14, VASP, VCP, VDAC1, VEGFA, |
| | VEGFR1, VEGFR2, VPS37C, WIZ, XRCC5, XRCC6, YB-1, YWHAZ |
| Lung cancer | Pgrmc1 (progesterone receptor membrane component l)/sigma-2 receptor, STEAP, EZH2 |
| Lung cancer | Prohibitin, CD23, Amylin Peptide, HRP, Rad51, Pax-5, Oct-3/, GLUT-1, PSCA, |
| | Thrombospondin, FHIT, a-B-Crystallin, LewisA, Vacular Endothelial Growth |
| | Factor(VEGF), Hepatocyte Factor Homologue-4, Flt-4, GluR6/7, Prostate Apoptosis |
| | Response Protein-4, GluR1, Fli-1, Urocortin, S100A4, 14-3-3 beta, P504S, HDAC1, PGP9.5, |
| | DJ-1, COX2, MMP-19, Actin, skeletal muscle, Claudin 3, Cadherin-P, Collagen IX, |
| | p27Kip1, Cathepsin D, CD30 (Reed-Sternberg Cell Marker), Ubiquitin, FSH-b, TrxR2, |
| | CCK-8, Cyclin C, CD138, TGF-beta 2, Adrenocorticotrophic Hormone, PPAR-gamma, Bcl- |
| | 6, GLUT-3, IGF-I, mRANKL, Fas-ligand, Filamin, Calretinin, O ct-1, Parathyroid Hormone, |
| | Claudin 5, Claudin 4, Raf-1 (Phospho-specific), CDC14A Phosphatase, Mitochondria, APC, |
| | Gastrin 1, Ku (p80), Gail, XPA, Maltose Binding Protein, Melanoma (gp100), |
| | Phosphotyrosine, Amyloid A, CXCR4/Fusin, Hepatic Nuclear Factor-36, Caspase 1, HPV |
| | 16-E7, Axonal Growth Cones, Lck, Ornithine Decarboxylase, Gamma Glutamylcysteine |
| | Synthetase(GCS)/Glutamate-cysteine Ligase, ERCC1, Calmodulin, Caspase 7 (Mch 3), |
| | CD137 (4-1BB), Nitric Oxide Synthase, brain (bNOS), E2F-2, IL-10R, L-Plastin, CD18, |
| | Vimentin, CD50/ICAM-3, Superoxide Dismutase, Adenovirus Type 5 E1A, PHAS-I, |
| | Progesterone Receptor (phospho-specific) - Serine 294, MHC II (HLA-DQ), XPG, ER Ca+2 |
| | ATPase2, Laminin-s, E3 -binding protein (ARM1), CD45RO, CD1, Cdk2, MMP-10 |
| | (Stromilysin-2), sm, Surfactant Protein B (Pro), Apolipoprotein D, CD46, Keratin 8 |
| | (phospho-specific Ser73), PCNA, FLAP, CD20, Syk, LH, Keratin 19, ADP-ribosylation |
| | Factor (ARF-6), Int-2 Oncoprotein, Luciferase, AIF (Apoptosis Inducing Factor), Grb2, bcl- |
| | X, CD16, Paxillin, MHC II (HLA-DP and DR), B-Cell, p21WAF1, MHC II (HLA-DR), |
| | Tyrosinase, E2F-1, Pds1, Calponin, Notch, CD26/DPP IV, SV40 Large T Antigen, Ku |
| | (p70/p80), Perform, XPF, SIM Ag (SIMA-4D3), Cdk1/p34cdc2, Neuron Specific Enolase, b- |
| | 2-Microglobulin, DNA Polymerase Beta, Thyroid Hormone Receptor, Human, Alkaline |
| | Phosphatase (AP), Plasma Cell Marker, Heat Shock Protein 70/hsp70, TRP75/gp75, SRF |
| | (Serum Response Factor), Laminin B1/b1, Mast Cell Chymase, Caldesmon, CEA/CD66e, |
| | CD24, Retinoid X Receptor (hRXR), CD45/T200/LCA, Rabies Virus, Cytochrome c, DR3, |
| | bcl-XL, Fascin, CD71/Transferrin Receptor |
| Lung Cancer | miR-497 |
| Lung Cancer | Pgrmc1 |
| Ovarian Cancer | CA-125, CA 19-9, c-reactive protein, CD95(also called Fas, Fas antigen, Fas receptor, FasR, |
| | TNFRSF6, APT1 or APO-1), FAP-1, miR-200 microRNAs, EGFR, EGFRvIII, |
| | apolipoprotein AI, apolipoprotein CIII, myoglobin, tenascin C, MSH6, claudin-3, claudin-4, |
| | caveolin-1, coagulation factor III, CD9, CD36, CD37, CD53, CD63, CD81, CD136, CD147, |
| | Hsp70, Hsp90, Rab13, Desmocollin-1, EMP-2, CK7, CK20, GCDF15, CD82, Rab-5b, |
| | Annexin V, MFG-E8, HLA-DR. MiR-200 microRNAs (miR-200a, miR-200b, miR-200c), |
| | miR-141, miR-429, JNK, Jun |
| Prostate Cancer v | AQP2, BMP5, C16orf86, CXCL13, DST, ERCC1, GNAO1, KLHL5, MAP4K1, NELL2, |
| normal | PENK, PGF, POU3F1, PRSS21, SCML1, SEMG1, SMARCD3, SNAI2, TAF1C, TNNT3 |
| Prostate Cancer v | ADRB2, ARG2, C22orf32, CYorf14, EIF1AY, FEV, KLK2, KLK4, LRRC26, MAOA, |
| Breast Cancer | NLGN4Y, PNPLA7, PVRL3, SIM2, SLC30A4, SLC45A3, STX19, TRIM36, TRPM8 |
| Prostate Cancer v | ADRB2, BAIAP2L2, C19orf33, CDX1, CEACAM6, EEF1A2, ERN2, FAM110B, FOXA2, |
| Colorectal Cancer | KLK2, KLK4, LOC389816, LRRC26, MIPOL1, SLC45A3, SPDEF, TRIM31, TRIM36, |
| | ZNF613 |
| Prostate Cancer v | ASTN2, CAB39L, CRIP1, FAM110B, FEV, GSTP1, KLK2, KLK4, LOC389816, LRRC26, |
| Lung Cancer | MUC1, PNPLA7, SIM2, SLC45A3, SPDEF, TRIM36, TRPV6, ZNF613 |
| Prostate Cancer | miRs-26a + b, miR-15, miR-16, miR-195, miR-497, miR-424, miR-206, miR-342-5p, miR- |
| | 186, miR-1271, miR-600, miR-216b, miR-519 family, miR-203 |
| Integrins | ITGA1 (CD49a, VLA1), ITGA2 (CD49b, VLA2), ITGA3 (CD49c, VLA3), ITGA4 (CD49d, |
| | VLA4), ITGA5 (CD49e, VLA5), ITGA6 (CD49f, VLA6), ITGA7 (FLJ25220), ITGA8, |
| | ITGA9 (RLC), ITGA10, ITGA11 (HsT18964), ITGAD (CD11D, FLJ39841), ITGAE |
| | (CD103, HUMINAE), ITGAL (CD11a, LFA1A), ITGAM (CD11b, MAC-1), ITGAV |
| | (CD51, VNRA, MSK8), ITGAW, ITGAX (CD11c), ITGB1 (CD29, FNRB, MSK12, |
| | MDF20), ITGB2 (CD18, LFA-1, MAC-1, MFI7), ITGB3 (CD61, GP3A, GPIIIa), ITGB4 |
| | (CD104), ITGB5 (FLJ26658), ITGB6, ITGB7, ITGB8 |
| Glycoprotein | GpIa-IIa, GpIIb-IIIa, GpIIIb, GpIb, GpIX |
| Transcription | STAT3, EZH2, p53, MACC1, SPDEF, RUNX2, YB-1 |
| factors | |
| Kinases | AURKA, AURKB |
| Disease Markers | 6Ckine, Adiponectin, Adrenocorticotropic Hormone, Agouti-Related Protein, Aldose |
| | Reductase, Alpha-1-Antichymotrypsin, Alpha-1-Antitrypsin, Alpha-1-Microglobulin, Alpha- |
| | 2-Macroglobulin, Alpha-Fetoprotein, Amphiregulin, Angiogenin, Angiopoietin-2, |
| | Angiotensin-Converting Enzyme, Angiotensinogen, Annexin A1, Apolipoprotein A-I, |
| | Apolipoprotein A-II, Apolipoprotein A-IV, Apolipoprotein B, Apolipoprotein C-I, |
| | Apolipoprotein C-III, Apolipoprotein D, Apolipoprotein E, Apolipoprotein H, |
| | Apolipoprotein(a), AXL Receptor Tyrosine Kinase, B cell-activating Factor, B Lymphocyte |
| | Chemoattractant, Bcl-2-like protein 2, Beta-2-Microglobulin, Betacellulin, Bone |
| | Morphogenetic Protein 6, Brain-Derived Neurotrophic Factor, Calbindin, Calcitonin, Cancer |
| | Antigen 125, Cancer Antigen 15-3, Cancer Antigen 19-9, Cancer Antigen 72-4, |
| | Carcinoembryonic Antigen, Cathepsin D, CD 40 antigen, CD40 Ligand, CD5 Antigen-like, |
| | Cellular Fibronectin, Chemokine CC-4, Chromogranin-A, Ciliary Neurotrophic Factor, |
| | Clusterin, Collagen IV, Complement C3, Complement Factor H, Connective Tissue Growth |
| | Factor, Cortisol, C-Peptide, C-Reactive Protein, Creatine Kinase-MB, Cystatin-C, Endoglin, |
| | Endostatin, Endothelin-1, EN-RAGE, Eotaxin-1, Eotaxin-2, Eotaxin-3, Epidermal Growth |
| | Factor, Epiregulin, Epithelial cell adhesion molecule, Epithelial-Derived Neutrophil- |
| | Activating Protein 78, Erythropoietin, E-Selectin, Ezrin, Factor VII, Fas Ligand, FASLG |
| | Receptor, Fatty Acid-Binding Protein (adipocyte), Fatty Acid-Binding Protein (heart), Fatty |
| | Acid-Binding Protein (liver), Ferritin, Fetuin-A, Fibrinogen, Fibroblast Growth Factor 4, |
| | Fibroblast Growth Factor basic, Fibulin-1C, Follicle-Stimulating Hormone, Galectin-3, |
| | Gelsolin, Glucagon, Glucagon-like Peptide 1, Glucose-6-phosphate Isomerase, Glutamate- |
| | Cysteine Ligase Regulatory subunit, Glutathione S-Transferase alpha, Glutathione S- |
| | Transferase Mu 1, Granulocyte Colony-Stimulating Factor, Granulocyte-Macrophage |
| | Colony-Stimulating Factor, Growth Hormone, Growth-Regulated alpha protein, Haptoglobin, |
| | HE4, Heat Shock Protein 60, Heparin-Binding EGF-Like Growth Factor, Hepatocyte Growth |
| | Factor, Hepatocyte Growth Factor Receptor, Hepsin, Human Chorionic Gonadotropin beta, |
| | Human Epidermal Growth Factor Receptor 2, Immunoglobulin A, Immunoglobulin E, |
| | Immunoglobulin M, Insulin, Insulin-like Growth Factor I, Insulin-like Growth Factor- |
| | Binding Protein 1, Insulin-like Growth Factor-Binding Protein 2, Insulin-like Growth Factor- |
| | Binding Protein 3, Insulin-like Growth Factor Binding Protein 4, Insulin-like Growth Factor |
| | Binding Protein 5, Insulin-like Growth Factor Binding Protein 6, Intercellular Adhesion |
| | Molecule 1, Interferon gamma, Interferon gamma Induced Protein 10, Interferon-inducible T- |
| | cell alpha chemoattractant, Interleukin-1 alpha, Interleukin-1 beta, Interleukin-1 Receptor |
| | antagonist, Interleukin-2, Interleukin-2 Receptor alpha, Interleukin-3, Interleukin-4, |
| | Interleukin-5, Interleukin-6, Interleukin-6 Receptor, Interleukin-6 Receptor subunit beta, |
| | Interleukin-7, Interleukin-8, Interleukin-10, Interleukin-11, Interleukin-12 Subunit p40, |
| | Interleukin-12 Subunit p70, Interleukin-13, Interleukin-15, Interleukin-16, Interleukin-25, |
| | Kallikrein 5, Kallikrein-7, Kidney Injury Molecule-1, Lactoylglutathione lyase, Latency- |
| | Associated Peptide of Transforming Growth Factor beta 1, Lectin-Like Oxidized LDL |
| | Receptor 1, Leptin, Luteinizing Hormone, Lymphotactin, Macrophage Colony-Stimulating |
| | Factor 1, Macrophage Inflammatory Protein-1 alpha, Macrophage Inflammatory Protein-1 |
| | beta, Macrophage Inflammatory Protein-3 alpha, Macrophage inflammatory protein 3 beta, |
| | Macrophage Migration Inhibitory Factor, Macrophage-Derived Chemokine, Macrophage- |
| | Stimulating Protein, Malondialdehyde-Modified Low-Density Lipoprotein, Maspin, Matrix |
| | Metalloproteinase- 1, Matrix Metalloproteinase-2, Matrix Metalloproteinase-3, Matrix |
| | Metalloproteinase-7, Matrix Metalloproteinase-9, Matrix Metalloproteinase-9, Matrix |
| | Metalloproteinase-10, Mesothelin, MHC class I chain-related protein A, Monocyte |
| | Chemotactic Protein 1, Monocyte Chemotactic Protein 2, Monocyte Chemotactic Protein 3, |
| | Monocyte Chemotactic Protein 4, Monokine Induced by Gamma Interferon, Myeloid |
| | Progenitor Inhibitory Factor 1, Myeloperoxidase, Myoglobin, Nerve Growth Factor beta, |
| | Neuronal Cell Adhesion Molecule, Neuron-Specific Enolase, Neuropilin-1, Neutrophil |
| | Gelatinase-Associated Lipocalin, NT-proBNP, Nucleoside diphosphate kinase B, |
| | Osteopontin, Osteoprotegerin, Pancreatic Polypeptide, Pepsinogen I, Peptide YY, |
| | Peroxiredoxin-4, Phosphoserine Aminotransferase, Placenta Growth Factor, Plasminogen |
| | Activator Inhibitor 1, Platelet-Derived Growth Factor BB, Pregnancy-Associated Plasma |
| | Protein A, Progesterone, Proinsulin (inc. Total or Intact), Prolactin, Prostasin, Prostate- |
| | Specific Antigen (inc. Free PSA), Prostatic Acid Phosphatase, Protein S100-A4, Protein |
| | S100-A6, Pulmonary and Activation-Regulated Chemokine, Receptor for advanced |
| | glycosylation end products, Receptor tyrosine-protein kinase erbB-3, Resistin, S100 calcium- |
| | binding protein B, Secretin, Serotransferrin, Serum Amyloid P-Component, Serum Glutamic |
| | Oxaloacetic Transaminase, Sex Hormone-Binding Globulin, Sortilin, Squamous Cell |
| | Carcinoma Antigen-1, Stem Cell Factor, Stromal cell-derived Factor-1, Superoxide |
| | Dismutase 1 (soluble), T Lymphocyte-Secreted Protein I-309, Tamm-Horsfall Urinary |
| | Glycoprotein, T-Cell-Specific Protein RANTES, Tenascin-C, Testosterone, Tetranectin, |
| | Thrombomodulin, Thrombopoietin, Thrombospondin-1, Thyroglobulin, Thyroid-Stimulating |
| | Hormone, Thyroxine-Binding Globulin, Tissue Factor, Tissue Inhibitor of Metalloproteinases |
| | 1, Tissue type Plasminogen activator, TNF-Related Apoptosis-Inducing Ligand Receptor 3, |
| | Transforming Growth Factor alpha, Transforming Growth Factor beta-3, Transthyretin, |
| | Trefoil Factor 3, Tumor Necrosis Factor alpha, Tumor Necrosis Factor beta, Tumor Necrosis |
| | Factor Receptor I, Tumor necrosis Factor Receptor 2, Tyrosine kinase with Ig and EGF |
| | homology domains 2, Urokinase-type Plasminogen Activator, Urokinase-type plasminogen |
| | activator Receptor, Vascular Cell Adhesion Molecule-1, Vascular Endothelial Growth Factor, |
| | Vascular endothelial growth Factor B, Vascular Endothelial Growth Factor C, Vascular |
| | endothelial growth Factor D, Vascular Endothelial Growth Factor Receptor 1, Vascular |
| | Endothelial Growth Factor Receptor 2, Vascular endothelial growth Factor Receptor 3, |
| | Vitamin K-Dependent Protein S, Vitronectin, von Willebrand Factor, YKL-40 |
| Disease Markers | Adiponectin, Adrenocorticotropic Hormone, Agouti-Related Protein, Alpha-1- |
| | Antichymotrypsin, Alpha-1-Antitrypsin, Alpha-1-Microglobulin, Alpha-2-Macroglobulin, |
| | Alpha-Fetoprotein, Amphiregulin, Angiopoietin-2, Angiotensin-Converting Enzyme, |
| | Angiotensinogen, Apolipoprotein A-I, Apolipoprotein A-II, Apolipoprotein A-IV, |
| | Apolipoprotein B, Apolipoprotein C-I, Apolipoprotein C-III, Apolipoprotein D, |
| | Apolipoprotein E, Apolipoprotein H, Apolipoprotein(a), AXL Receptor Tyrosine Kinase, B |
| | Lymphocyte Chemoattractant, Beta-2-Microglobulin, Betacellulin, Bone Morphogenetic |
| | Protein 6, Brain-Derived Neurotrophic Factor, Calbindin, Calcitonin, Cancer Antigen 125, |
| | Cancer Antigen 19-9, Carcinoembryonic Antigen, CD 40 antigen, CD40 Ligand, CD5 |
| | Antigen-like, Chemokine CC-4, Chromogranin-A, Ciliary Neurotrophic Factor, Clusterin, |
| | Complement C3, Complement Factor H, Connective Tissue Growth Factor, Cortisol, C- |
| | Peptide, C-Reactive Protein, Creatine Kinase-MB, Cystatin-C, Endothelin-1, EN-RAGE, |
| | Eotaxin-1, Eotaxin-3, Epidermal Growth Factor, Epiregulin, Epithelial-Derived Neutrophil- |
| | Activating Protein 78, Erythropoietin, E-Selectin, Factor VII, Fas Ligand, FASLG Receptor, |
| | Fatty Acid-Binding Protein (heart), Ferritin, Fetuin-A, Fibrinogen, Fibroblast Growth Factor |
| | 4, Fibroblast Growth Factor basic, Follicle-Stimulating Hormone, Glucagon, Glucagon-like |
| | Peptide 1, Glutathione S-Transferase alpha, Granulocyte Colony-Stimulating Factor, |
| | Granulocyte-Macrophage Colony-Stimulating Factor, Growth Hormone, Growth-Regulated |
| | alpha protein, Haptoglobin, Heat Shock Protein 60, Heparin-Binding EGF-Like Growth |
| | Factor, Hepatocyte Growth Factor, Immunoglobulin A, Immunoglobulin E, Immunoglobulin |
| | M, Insulin, Insulin-like Growth Factor I, Insulin-like Growth Factor-Binding Protein 2, |
| | Intercellular Adhesion Molecule 1, Interferon gamma, Interferon gamma Induced Protein 10, |
| | Interleukin-1 alpha, Interleukin-1 beta, Interleukin-1 Receptor antagonist, Interleukin-2, |
| | Interleukin-3, Interleukin-4, Interleukin-5, Interleukin-6, Interleukin-6 Receptor, Interleukin- |
| | 7, Interleukin-8, Interleukin-10, Interleukin-11, Interleukin-12 Subunit p40, Interleukin-12 |
| | Subunit p70, Interleukin-13, Interleukin-15, Interleukin-16, Interleukin-25, Kidney Injury |
| | Molecule-1, Lectin-Like Oxidized LDL Receptor 1, Leptin, Luteinizing Hormone, |
| | Lymphotactin, Macrophage Colony-Stimulating Factor 1, Macrophage Inflammatory Protein- |
| | 1 alpha, Macrophage Inflammatory Protein-1 beta, Macrophage Inflammatory Protein-3 |
| | alpha, Macrophage Migration Inhibitory Factor, Macrophage-Derived Chemokine, |
| | Malondialdehyde-Modified Low-Density Lipoprotein, Matrix Metalloproteinase-1, Matrix |
| | Metalloproteinase-2, Matrix Metalloproteinase-3, Matrix Metalloproteinase-7, Matrix |
| | Metalloproteinase-9, Matrix Metalloproteinase-9, Matrix Metalloproteinase-10, Monocyte |
| | Chemotactic Protein 1, Monocyte Chemotactic Protein 2, Monocyte Chemotactic Protein 3, |
| | Monocyte Chemotactic Protein 4, Monokine Induced by Gamma Interferon, Myeloid |
| | Progenitor Inhibitory Factor 1, Myeloperoxidase, Myoglobin, Nerve Growth Factor beta, |
| | Neuronal Cell Adhesion Molecule, Neutrophil Gelatinase-Associated Lipocalin, NT-proBNP, |
| | Osteopontin, Pancreatic Polypeptide, Peptide YY, Placenta Growth Factor, Plasminogen |
| | Activator Inhibitor 1, Platelet-Derived Growth Factor BB, Pregnancy-Associated Plasma |
| | Protein A, Progesterone, Proinsulin (inc. Intact or Total), Prolactin, Prostate-Specific Antigen |
| | (inc. Free PSA), Prostatic Acid Phosphatase, Pulmonary and Activation-Regulated |
| | Chemokine, Receptor for advanced glycosylation end products, Resistin, S100 calcium- |
| | binding protein B, Secretin, Serotransferrin, Serum Amyloid P-Component, Serum Glutamic |
| | Oxaloacetic Transaminase, Sex Hormone-Binding Globulin, Sortilin, Stem Cell Factor, |
| | Superoxide Dismutase 1 (soluble), T Lymphocyte-Secreted Protein I-309, Tamm-Horsfall |
| | Urinary Glycoprotein, T-Cell-Specific Protein RANTES, Tenascin-C, Testosterone, |
| | Thrombomodulin, Thrombopoietin, Thrombospondin-1, Thyroid-Stimulating Hormone, |
| | Thyroxine-Binding Globulin, Tissue Factor, Tissue Inhibitor of Metalloproteinases 1, TNF- |
| | Related Apoptosis-Inducing Ligand Receptor 3, Transforming Growth Factor alpha, |
| | Transforming Growth Factor beta-3, Transthyretin, Trefoil Factor 3, Tumor Necrosis Factor |
| | alpha, Tumor Necrosis Factor beta, Tumor necrosis Factor Receptor 2, Vascular Cell |
| | Adhesion Molecule-1, Vascular Endothelial Growth Factor, Vitamin K-Dependent Protein S, |
| | Vitronectin, von Willebrand Factor |
| Oncology | 6Ckine, Aldose Reductase, Alpha-Fetoprotein, Amphiregulin, Angiogenin, Annexin A1, B |
| | cell-activating Factor, B Lymphocyte Chemoattractant, Bcl-2-like protein 2, Betacellulin, |
| | Cancer Antigen 125, Cancer Antigen 15-3, Cancer Antigen 19-9, Cancer Antigen 72-4, |
| | Carcinoembryonic Antigen, Cathepsin D, Cellular Fibronectin, Collagen IV, Endoglin, |
| | Endostatin, Eotaxin-2, Epidermal Growth Factor, Epiregulin, Epithelial cell adhesion |
| | molecule, Ezrin, Fatty Acid-Binding Protein (adipocyte), Fatty Acid-Binding Protein (liver), |
| | Fibroblast Growth Factor basic, Fibulin-1C, Galectin-3, Gelsolin, Glucose-6-phosphate |
| | Isomerase, Glutamate-Cysteine Ligase Regulatory subunit, Glutathione S-Transferase Mu 1, |
| | HE4, Heparin-Binding EGF-Like Growth Factor, Hepatocyte Growth Factor, Hepatocyte |
| | Growth Factor Receptor, Hepsin, Human Chorionic Gonadotropin beta, Human Epidermal |
| | Growth Factor Receptor 2, Insulin-like Growth Factor-Binding Protein 1, Insulin-like Growth |
| | Factor-Binding Protein 2, Insulin-like Growth Factor-Binding Protein 3, Insulin-like Growth |
| | Factor Binding Protein 4, Insulin-like Growth Factor Binding Protein 5, Insulin-like Growth |
| | Factor Binding Protein 6, Interferon gamma Induced Protein 10, Interferon-inducible T-cell |
| | alpha chemoattractant, Interleukin-2 Receptor alpha, Interleukin-6, Interleukin-6 Receptor |
| | subunit beta, Kallikrein 5, Kallikrein-7, Lactoylglutathione lyase, Latency-Associated Peptide |
| | of Transforming Growth Factor beta 1, Leptin, Macrophage inflammatory protein 3 beta, |
| | Macrophage Migration Inhibitory Factor, Macrophage-Stimulating Protein, Maspin, Matrix |
| | Metalloproteinase-2, Mesothelin, MHC class I chain-related protein A, Monocyte |
| | Chemotactic Protein 1, Monokine Induced by Gamma Interferon, Neuron-Specific Enolase, |
| | Neuropilin-1, Neutrophil Gelatinase-Associated Lipocalin, Nucleoside diphosphate kinase B, |
| | Osteopontin, Osteoprotegerin, Pepsinogen I, Peroxiredoxin-4, Phosphoserine |
| | Aminotransferase, Placenta Growth Factor, Platelet-Derived Growth Factor BB, Prostasin, |
| | Protein S100-A4, Protein S100-A6, Receptor tyrosine-protein kinase erbB-3, Squamous Cell |
| | Carcinoma Antigen-1, Stromal cell-derived Factor-1, Tenascin-C, Tetranectin, |
| | Thyroglobulin, Tissue type Plasminogen activator, Transforming Growth Factor alpha, |
| | Tumor Necrosis Factor Receptor I, Tyrosine kinase with Ig and EGF homology domains 2, |
| | Urokinase-type Plasminogen Activator, Urokinase-type plasminogen activator Receptor, |
| | Vascular Endothelial Growth Factor, Vascular endothelial growth Factor B, Vascular |
| | Endothelial Growth Factor C, Vascular endothelial growth Factor D, Vascular Endothelial |
| | Growth Factor Receptor 1, Vascular Endothelial Growth Factor Receptor 2, Vascular |
| | endothelial growth Factor Receptor 3, YKL-40 |
| Disease | Adiponectin, Alpha-1-Antitrypsin, Alpha-2-Macroglobulin, Alpha-Fetoprotein, |
| | Apolipoprotein A-I, Apolipoprotein C-III, Apolipoprotein H, Apolipoprotein(a), Beta-2- |
| | Microglobulin, Brain-Derived Neurotrophic Factor, Calcitonin, Cancer Antigen 125, Cancer |
| | Antigen 19-9, Carcinoembryonic Antigen, CD 40 antigen, CD40 Ligand, Complement C3, C- |
| | Reactive Protein, Creatine Kinase-MB, Endothelin-1, EN-RAGE, Eotaxin-1, Epidermal |
| | Growth Factor, Epithelial-Derived Neutrophil-Activating Protein 78, Erythropoietin, Factor |
| | VII, Fatty Acid-Binding Protein (heart), Ferritin, Fibrinogen, Fibroblast Growth Factor basic, |
| | Granulocyte Colony-Stimulating Factor, Granulocyte-Macrophage Colony-Stimulating |
| | Factor, Growth Hormone, Haptoglobin, Immunoglobulin A, Immunoglobulin E, |
| | Immunoglobulin M, Insulin, Insulin-like Growth Factor I, Intercellular Adhesion Molecule 1, |
| | Interferon gamma, Interleukin-1 alpha, Interleukin-1 beta, Interleukin-1 Receptor antagonist, |
| | Interleukin-2, Interleukin-3, Interleukin-4, Interleukin-5, Interleukin-6, Interleukin-7, |
| | Interleukin-8, Interleukin-10, Interleukin-12 Subunit p40, Interleukin-12 Subunit p70, |
| | Interleukin-13, Interleukin-15, Interleukin-16, Leptin, Lymphotactin, Macrophage |
| | Inflammatory Protein-1 alpha, Macrophage Inflammatory Protein-1 beta, Macrophage- |
| | Derived Chemokine, Matrix Metalloproteinase-2, Matrix Metalloproteinase-3, Matrix |
| | Metalloproteinase-9, Monocyte Chemotactic Protein 1, Myeloperoxidase, Myoglobin, |
| | Plasminogen Activator Inhibitor 1, Pregnancy-Associated Plasma Protein A, Prostate- |
| | Specific Antigen (inc. Free PSA), Prostatic Acid Phosphatase, Serum Amyloid P-Component, |
| | Serum Glutamic Oxaloacetic Transaminase, Sex Hormone-Binding Globulin, Stem Cell |
| | Factor, T-Cell- Specific Protein RANTES, Thrombopoietin, Thyroid-Stimulating Hormone, |
| | Thyroxine-Binding Globulin, Tissue Factor, Tissue Inhibitor of Metalloproteinases 1, Tumor |
| | Necrosis Factor alpha, Tumor Necrosis Factor beta, Tumor Necrosis Factor Receptor 2, |
| | Vascular Cell Adhesion Molecule-1, Vascular Endothelial Growth Factor, von Willebrand |
| | Factor |
| Neurological | Alpha-1-Antitrypsin, Apolipoprotein A-I, Apolipoprotein A-II, Apolipoprotein B, |
| | Apolipoprotein C-I, Apolipoprotein H, Beta-2-Microglobulin, Betacellulin, Brain-Derived |
| | Neurotrophic Factor, Calbindin, Cancer Antigen 125, Carcinoembryonic Antigen, CD5 |
| | Antigen-like, Complement C3, Connective Tissue Growth Factor, Cortisol, Endothelin-1, |
| | Epidermal Growth Factor Receptor, Ferritin, Fetuin-A, Follicle-Stimulating Hormone, |
| | Haptoglobin, Immunoglobulin A, Immunoglobulin M, Intercellular Adhesion Molecule 1, |
| | Interleukin-6 Receptor, Interleukin-7, Interleukin-10, Interleukin-11, Interleukin-17, Kidney |
| | Injury Molecule-1, Luteinizing Hormone, Macrophage-Derived Chemokine, Macrophage |
| | Migration Inhibitory Factor, Macrophage Inflammatory Protein-1 alpha, Matrix |
| | Metalloproteinase-2, Monocyte Chemotactic Protein 2, Peptide YY, Prolactin, Prostatic Acid |
| | Phosphatase, Serotransferrin, Serum Amyloid P-Component, Sortilin, Testosterone, |
| | Thrombopoietin, Thyroid-Stimulating Hormone, Tissue Inhibitor of Metalloproteinases 1, |
| | TNF-Related Apoptosis-Inducing Ligand Receptor 3, Tumor necrosis Factor Receptor 2, |
| | Vascular Endothelial Growth Factor, Vitronectin |
| Cardiovascular | Adiponectin, Apolipoprotein A-I, Apolipoprotein B, Apolipoprotein C-III, Apolipoprotein D, |
| | Apolipoprotein E, Apolipoprotein H, Apolipoprotein(a), Clusterin, C-Reactive Protein, |
| | Cystatin-C, EN-RAGE, E-Selectin, Fatty Acid-Binding Protein (heart), Ferritin, Fibrinogen, |
| | Haptoglobin, Immunoglobulin M, Intercellular Adhesion Molecule 1, Interleukin-6, |
| | Interleukin-8, Lectin-Like Oxidized LDL Receptor 1, Leptin, Macrophage Inflammatory |
| | Protein-1 alpha, Macrophage Inflammatory Protein-1 beta, Malondialdehyde-Modified Low- |
| | Density Lipoprotein, Matrix Metalloproteinase-1, Matrix Metalloproteinase-10, Matrix |
| | Metalloproteinase-2, Matrix Metalloproteinase-3, Matrix Metalloproteinase-7, Matrix |
| | Metalloproteinase-9, Monocyte Chemotactic Protein 1, Myeloperoxidase, Myoglobin, NT- |
| | proBNP, Osteopontin, Plasminogen Activator Inhibitor 1, P-Selectin, Receptor for advanced |
| | glycosylation end products, Serum Amyloid P-Component, Sex Hormone-Binding Globulin, |
| | T-Cell-Specific Protein RANTES, Thrombomodulin, Thyroxine-Binding Globulin, Tissue |
| | Inhibitor of Metalloproteinases 1, Tumor Necrosis Factor alpha, Tumor necrosis Factor |
| | Receptor 2, Vascular Cell Adhesion Molecule-1, von Willebrand Factor |
| Inflammatory | Alpha-1-Antitrypsin, Alpha-2-Macroglobulin, Beta-2-Microglobulin, Brain-Derived |
| | Neurotrophic Factor, Complement C3, C-Reactive Protein, Eotaxin-1, Factor VII, Ferritin, |
| | Fibrinogen, Granulocyte-Macrophage Colony-Stimulating Factor, Haptoglobin, Intercellular |
| | Adhesion Molecule 1, Interferon gamma, Interleukin-1 alpha, Interleukin-1 beta, Interleukin- |
| | 1 Receptor antagonist, Interleukin-2, Interleukin-3, Interleukin-4, Interleukin-5, Interleukin-6, |
| | Interleukin-7, Interleukin-8, Interleukin-10, Interleukin-12 Subunit p40, Interleukin-12 |
| | Subunit p70, Interleukin-15, Interleukin-17, Interleukin-23, Macrophage Inflammatory |
| | Protein-1 alpha, Macrophage Inflammatory Protein-1 beta, Matrix Metalloproteinase-2, |
| | Matrix Metalloproteinase-3, Matrix Metalloproteinase-9, Monocyte Chemotactic Protein 1, |
| | Stem Cell Factor, T-Cell-Specific Protein RANTES, Tissue Inhibitor of Metalloproteinases 1, |
| | Tumor Necrosis Factor alpha, Tumor Necrosis Factor beta, Tumor necrosis Factor Receptor |
| | 2, Vascular Cell Adhesion Molecule-1, Vascular Endothelial Growth Factor, Vitamin D- |
| | Binding Protein, von Willebrand Factor |
| Metabolic | Adiponectin, Adrenocorticotropic Hormone, Angiotensin-Converting Enzyme, |
| | Angiotensinogen, Complement C3 alpha des arg, Cortisol, Follicle-Stimulating Hormone, |
| | Galanin, Glucagon, Glucagon-like Peptide 1, Insulin, Insulin-like Growth Factor I, Leptin, |
| | Luteinizing Hormone, Pancreatic Polypeptide, Peptide YY, Progesterone, Prolactin, Resistin, |
| | Secretin, Testosterone |
| Kidney | Alpha-1-Microglobulin, Beta-2-Microglobulin, Calbindin, Clusterin, Connective Tissue |
| | Growth Factor, Creatinine, Cystatin-C, Glutathione S-Transferase alpha, Kidney Injury |
| | Molecule-1, Microalbumin, Neutrophil Gelatinase-Associated Lipocalin, Osteopontin, |
| | Tamm-Horsfall Urinary Glycoprotein, Tissue Inhibitor of Metalloproteinases 1, Trefoil |
| | Factor 3, Vascular Endothelial Growth Factor |
| Cytokines | Granulocyte-Macrophage Colony-Stimulating Factor, Interferon gamma, Interleukin-2, |
| | Interleukin-3, Interleukin-4, Interleukin-5, Interleukin-6, Interleukin-7, Interleukin-8, |
| | Interleukin-10, Macrophage Inflammatory Protein-1 alpha, Macrophage Inflammatory |
| | Protein-1 beta, Matrix Metalloproteinase-2, Monocyte Chemotactic Protein 1, Tumor |
| | Necrosis Factor alpha, Tumor Necrosis Factor beta, Brain-Derived Neurotrophic Factor, |
| | Eotaxin-1, Intercellular Adhesion Molecule 1, Interleukin-1 alpha, Interleukin-1 beta, |
| | Interleukin-1 Receptor antagonist, Interleukin-12 Subunit p40, Interleukin-12 Subunit p70, |
| | Interleukin-15, Interleukin-17, Interleukin-23, Matrix Metalloproteinase-3, Stem Cell Factor, |
| | Vascular Endothelial Growth Factor |
| Protein | 14.3.3 gamma, 14.3.3 (Pan), 14-3-3 beta, 6-Histidine, a-B-Crystallin, Acinus, Actin beta, |
| | Actin (Muscle Specific), Actin (Pan), Actin (skeletal muscle), Activin Receptor Type II, |
| | Adenovirus, Adenovirus Fiber, Adenovirus Type 2 E1A, Adenovirus Type 5 E1A, ADP- |
| | ribosylation Factor (ARF-6), Adrenocorticotrophic Hormone, AIF (Apoptosis Inducing |
| | Factor), Alkaline Phosphatase (AP), Alpha Fetoprotein (AFP), Alpha Lactalbumin, alpha-1- |
| | antichymotrypsin, alpha-1-antitrypsin, Amphiregulin, Amylin Peptide, Amyloid A, Amyloid |
| | A4 Protein Precursor, Amyloid Beta (APP), Androgen Receptor, Ang-1, Ang-2, APC, |
| | APC11, APC2, Apolipoprotein D, A-Raf, ARC, Ask1/MAPKKK5, ATM, Axonal Growth |
| | Cones, b Galactosidase, b-2-Microglobulin, B7-H2, BAG-1, Bak, Bax, B-Cell, B-cell Linker |
| | Protein (BLNK), Bcl10/CIPER/CLAP/mE10, bcl-2a, Bcl-6, bcl-X, bcl-XL, Bim (BOD), |
| | Biotin, Bonzo/STRL33/TYMSTR, Bovine Serum Albumin, BRCA2 (aa 1323-1346), |
| | BrdU, Bromodeoxyuridine (BrdU), CA125, CA19-9, c-Abl, Cadherin (Pan), Cadherin-E, |
| | Cadherin-P, Calcitonin, Calcium Pump ATPase, Caldesmon, Calmodulin, Calponin, |
| | Calretinin, Casein, Caspase 1, Caspase 2, Caspase 3, Caspase 5, Caspase 6 (Mch 2), Caspase |
| | 7 (Mch 3), Caspase 8 (FLICE), Caspase 9, Catenin alpha, Catenin beta, Catenin gamma, |
| | Cathepsin D, CCK-8, CD1, CD10, CD100/Leukocyte Semaphorin, CD105, CD106/VCAM, |
| | CD115/c-fms/CSF-1R/M-CSFR, CD137 (4-1BB), CD138, CD14, CD15, CD155/PVR (Polio |
| | Virus Receptor), CD16, CD165, CD18, CD1a, CD1b, CD2, CD20, CD21, CD23, CD231, |
| | CD24, CD25/IL-2 Receptor a, CD26/DPP IV, CD29, CD30 (Reed-Sternberg Cell Marker), |
| | CD32/Fcg Receptor II, CD35/CR1, CD36GPIIIb/GPIV, CD3zeta, CD4, CD40, CD42b, |
| | CD43, CD45/T200/LCA, CD45RB, CD45RO, CD46, CD5, CD50/ICAM-3, CD53, |
| | CD54/ICAM-1, CD56/NCAM-1, CD57, CD59/MACIF/MIRL/Protectin, CD6, CD61/ |
| | Platelet Glycoprotein IIIA, CD63, CD68, CD71/Transferrin Receptor, CD79a mb-1, CD79b, |
| | CD8, CD81/TAPA-1, CD84, CD9, CD94, CD95/Fas, CD98, CDC14A Phosphatase, |
| | CDC25C, CDC34, CDC37, CDC47, CDC6, cdh1, Cdk1/p34cdc2, Cdk2, Cdk3, Cdk4, Cdk5, |
| | Cdk7, Cdk8, CDw17, CDw60, CDw75, CDw78, CEA/CD66e, c-erbB-2/HER-2/neu Ab-1 |
| | (21N), c-erbB-4/HER-4, c-fos, Chk1, Chorionic Gonadotropin beta (hCG-beta), |
| | Chromogranin A, CIDE-A, CIDE-B, CITED1, c-jun, Clathrin, claudin 11, Claudin 2, Claudin |
| | 3, Claudin 4, Claudin 5, CLAUDIN 7, Claudin-1, CNPase, Collagen II, Collagen IV, |
| | Collagen IX, Collagen VII, Connexin 43, COX2, CREB, CREB-Binding Protein, |
| | Cryptococcus neoformans, c-Src, Cullin-1 (CUL-1), Cullin-2 (CUL-2), Cullin-3 (CUL-3), |
| | CXCR4/Fusin, Cyclin B1, Cyclin C, Cyclin D1, Cyclin D3, Cyclin E, Cyclin E2, Cystic |
| | Fibrosis Transmembrane Regulator, Cytochrome c, D4-GDI, Daxx, DcR1, DcR2/TRAIL- |
| | R4/TRUNDD, Desmin, DFF40 (DNA Fragmentation Factor 40)/CAD, DFF45/ICAD, |
| | DJ-1, DNA Ligase I, DNA Polymerase Beta, DNA Polymerase Gamma, DNA Primase (p49), |
| | DNA Primase (p58), DNA-PKcs, DP-2, DR3, DR5, Dysferlin, Dystrophin, E2F-1, E2F-2, |
| | E2F-3, E2F-4, E2F-5, E3-binding protein (ARM1), EGFR, EMA/CA15-3/MUC-1, |
| | Endostatin, Epithelial Membrane Antigen (EMA/CA15-3/MUC-1), Epithelial Specific |
| | Antigen, ER beta, ER Ca+2 ATPase2, ERCC1, Erk1, ERK2, Estradiol, Estriol, Estrogen |
| | Receptor, Exol, Ezrin/p81/80K/Cytovillin, F.VIII/VWF, Factor VIII Related Antigen, FADD |
| | (FAS-Associated death domain-containing protein), Fascin, Fas-ligand, Ferritin, FGF-1, |
| | FGF-2, FHIT, Fibrillin-1, Fibronectin, Filaggrin, Filamin, FITC, Fli-1, FLIP, Flk-1/KDR/ |
| | VEGFR2, Flt-1/VEGFR1, Flt-4, Fra2, FSH, FSH-b, Fyn, Ga0, Gab-1, GABA a Receptor 1, |
| | GAD65, Gai1, Gamma Glutamyl Transferase (gGT), Gamma Glutamylcysteine |
| | Synthetase(GCS)/Glutamate-cysteine Ligase, GAPDH, Gastrin 1, GCDFP-15, G-CSF, |
| | GFAP, Glicentin, Glucagon, Glucose-Regulated Protein 94, GluR 2/3, GluR1, GluR4, |
| | GluR6/7, GLUT-1, GLUT-3, Glycogen Synthase Kinase 3b (GSK3b), Glycophorin A, GM- |
| | CSF, GnRH Receptor, Golgi Complex, Granulocyte, Granzyme B, Grb2, Green Fluorescent |
| | Protein (GFP), GRIP1, Growth Hormone (hGH), GSK-3, GST, GSTmu, H. Pylori, HDAC1, |
| | HDJ-2/DNAJ, Heat Shock Factor 1, Heat Shock Factor 2, Heat Shock Protein 27/hsp27, Heat |
| | Shock Protein 60/hsp60, Heat Shock Protein 70/hsp70, Heat Shock Protein 75/hsp75, Heat |
| | Shock Protein 90a/hsp86, Heat Shock Protein 90b/hsp84, Helicobacter pylori, Heparan |
| | Sulfate Proteoglycan, Hepatic Nuclear Factor-3B, Hepatocyte, Hepatocyte Factor |
| | Homologue-4, Hepatocyte Growth Factor, Heregulin, HIF-1a, Histone H1, hPL, HPV 16, |
| | HPV 16-E7, HRP, Human Sodium Iodide Symporter (hNIS), I-FLICE/CASPER, IFN |
| | gamma, IgA, IGF-1R, IGF-I, IgG, IgM (m-Heavy Chain), I-Kappa-B Kinase b (IKKb), IL-1 |
| | alpha, IL-1 beta, IL-10, IL-10R, IL17, IL-2, IL-3, IL-30, IL-4, IL-5, IL-6, IL-8, Inhibin alpha, |
| | Insulin, Insulin Receptor, Insulin Receptor Substrate-1, Int-2 Oncoprotein, Integrin beta5, |
| | Interferon-a(II), Interferon-g, Involucrin, IP10/CRG2, IPO-38 Proliferation Marker, IRAK, |
| | ITK, JNK Activating kinase (JKK1), Kappa Light Chain, Keratin 10, Keratin 10/13, Keratin |
| | 14, Keratin 15, Keratin 16, Keratin 18, Keratin 19, Keratin 20, Keratin 5/6/18, Keratin 5/8, |
| | Keratin 8, Keratin 8 (phospho-specific Ser73), Keratin 8/18, Keratin (LMW), Keratin (Multi), |
| | Keratin (Pan), Ki67, Ku (p70/p80), Ku (p80), L1 Cell Adhesion Molecule, Lambda Light |
| | Chain, Laminin B1/b1, Laminin B2/g1, Laminin Receptor, Laminin-s, Lck, Lck (p56lck), |
| | Leukotriene (C4, D4, E4), LewisA, LewisB, LH, L-Plastin, LRP/MVP, Luciferase, |
| | Macrophage, MADD, MAGE-1, Maltose Binding Protein, MAP1B, MAP2a, b, MART- |
| | 1/Melan-A, Mast Cell Chymase, Mcl-1, MCM2, MCM5, MDM2, Medroxyprogesterone |
| | Acetate (MPA), Mek1, Mek2, Mek6, Mekk-1, Melanoma (gp100), mGluR1, mGluR5, |
| | MGMT, MHC I (HLA25 and HLA-Aw32), MHC I (HLA-A), MHC I (HLA-A, B, C), MHC I |
| | (HLA-B), MHC II (HLA-DP and DR), MHC II (HLA-DP), MHC II (HLA-DQ), MHC II |
| | (HLA-DR), MHC II (HLA-DR) Ia, Microphthalmia, Milk Fat Globule Membrane Protein, |
| | Mitochondria, MLH1, MMP-1 (Collagenase-I), MMP-10 (Stromilysin-2), MMP-11 |
| | (Stromelysin-3), MMP-13 (Collagenase-3), MMP-14/MT1-MMP, MMP-15/MT2-MMP, |
| | MMP-16/MT3-MMP, MMP-19, MMP-2 (72 kDa Collagenase IV), MMP-23, MMP-7 |
| | (Matrilysin), MMP-9 (92 kDa Collagenase IV), Moesin, mRANKL, Muc-1, Mucin 2, Mucin 3 |
| | (MUC3), Mucin 5AC, MyD88, Myelin/Oligodendrocyte, Myeloid Specific Marker, |
| | Myeloperoxidase, MyoD1, Myogenin, Myoglobin, Myosin Smooth Muscle Heavy Chain, |
| | Nck, Negative Control for Mouse IgG1, Negative Control for Mouse IgG2a, Negative |
| | Control for Mouse IgG3, Negative Control for Mouse IgM, Negative Control for Rabbit IgG, |
| | Neurofilament, Neurofilament (160 kDa), Neurofilament (200 kDa), Neurofilament (68 kDa), |
| | Neuron Specific Enolase, Neutrophil Elastase, NF kappa B/p50, NF kappa B/p65 (Rel A), |
| | NGF-Receptor (p75NGFR), brain Nitric Oxide Synthase (bNOS), endothelial Nitric Oxide |
| | Synthase (eNOS), nm23, NOS-i, NOS-u, Notch, Nucleophosmin (NPM), NuMA, O ct-1, |
| | Oct-2/, Oct-3/, Ornithine Decarboxylase, Osteopontin, p130, p130cas, p14ARF, p15INK4b, |
| | p16INK4a, p170, p170/MDR-1, p18INK4c, p19ARF, p19Skp1, p21WAF1, p27Kip1, p300/ |
| | CBP, p35nck5a, P504S, p53, p57Kip2 Ab-7, p63 (p53 Family Member), p73, p73a, p73a/b, |
| | p95VAV, Parathyroid Hormone, Parathyroid Hormone Receptor Type 1, Parkin, PARP, |
| | PARP (Poly ADP-Ribose Polymerase), Pax-5, Paxillin, PCNA, PCTAIRE2, PDGF, PDGFR |
| | alpha, PDGFR beta, Pds1, Perform, PGP9.5, PHAS-I, PHAS-II, Phospho-Ser/Thr/Tyr, |
| | Phosphotyrosine, PLAP, Plasma Cell Marker, Plasminogen, PLC gamma 1, PMP-22, |
| | Pneumocystis jiroveci, PPAR-gamma, PR3 (Proteinase 3), Presenillin, Progesterone, |
| | Progesterone Receptor, Progesterone Receptor (phospho-specific) - Serine 190, Progesterone |
| | Receptor (phospho-specific) - Serine 294, Prohibitin, Prolactin, Prolactin Receptor, Prostate |
| | Apoptosis Response Protein-4, Prostate Specific Acid Phosphatase, Prostate Specific |
| | Antigen, pS2, PSCA, Rabies Virus, RAD1, Rad51, Raf1, Raf-1 (Phospho-specific), RAIDD, |
| | Ras, Rad18, Renal Cell Carcinoma, Ret Oncoprotein, Retinoblastoma, Retinoblastoma (Rb) |
| | (Phospho-specific Serine608), Retinoic Acid Receptor (b), Retinoid X Receptor (hRXR), |
| | Retinol Binding Protein, Rhodopsin (Opsin), ROC, RPA/p32, RPA/p70, Ruv A, Ruv B, Ruv |
| | C, S100, S100A4, S100A6, SHP-1, SIM Ag (SIMA-4D3), SIRP a1, sm, SODD (Silencer of |
| | Death Domain), Somatostatin Receptor-I, SRC1 (Steroid Receptor Coactivator-1) Ab-1, |
| | SREBP-1 (Sterol Regulatory Element Binding Protein-1), SRF (Serum Response Factor), |
| | Stat-1, Stat3, Stat5, Stat5a, Stat5b, Stat6, Streptavidin, Superoxide Dismutase, Surfactant |
| | Protein A, Surfactant Protein B, Surfactant Protein B (Pro), Survivin, SV40 Large T Antigen, |
| | Syk, Synaptophysin, Synuclein, Synuclein beta, Synuclein pan, TACE (TNF-alpha |
| | converting enzyme)/ADAM17, TAG-72, tau, TdT, Tenascin, Testosterone, TGF beta 3, |
| | TGF-beta 2, Thomsen-Friedenreich Antigen, Thrombospondin, Thymidine Phosphorylase, |
| | Thymidylate Synthase, Thymine Glycols, Thyroglobulin, Thyroid Hormone Receptor beta, |
| | Thyroid Hormone Receptor, Thyroid Stimulating Hormone (TSH), TID-1, TIMP-1, TIMP-2, |
| | TNF alpha, TNFa, TNR-R2, Topo II beta, Topoisomerase IIa, Toxoplasma Gondii, TR2, |
| | TRADD, Transforming Growth Factor a, Transglutaminase II, TRAP, Tropomyosin, TRP75/ |
| | gp75, TrxR2, TTF-1, Tubulin, Tubulin-a, Tubulin-b, Tyrosinase, Ubiquitin, UCP3, uPA, |
| | Urocortin, Vacular Endothelial Growth Factor(VEGF), Vimentin, Vinculin, Vitamin D |
| | Receptor (VDR), von Hippel-Lindau Protein, Wnt-1, Xanthine Oxidase, XPA, XPF, XPG, |
| | XRCC1, XRCC2, ZAP-70, Zip kinase |
| Known Cancer | ABL1, ABL2, ACSL3, AF15Q14, AF1Q, AF3p21, AF5q31, AKAP9, AKT1, AKT2, |
| Genes | ALDH2, ALK, ALO17, APC, ARHGEF12, ARHH, ARID1A, ARID2, ARNT, ASPSCR1, |
| | ASXL1, ATF1, ATIC, ATM, ATRX, BAP1, BCL10, BCL11A, BCL11B, BCL2, BCL3, |
| | BCL5, BCL6, BCL7A, BCL9, BCOR, BCR, BHD, BIRC3, BLM, BMPR1A, BRAF, |
| | BRCA1, BRCA2, BRD3, BRD4, BRIP1, BTG1, BUB1B, C12orf9, C15orf21, C15orf55, |
| | C16orf75, CANT1, CARD11, CARS, CBFA2T1, CBFA2T3, CBFB, CBL, CBLB, CBLC, |
| | CCNB1IP1, CCND1, CCND2, CCND3, CCNE1, CD273, CD274, CD74, CD79A, CD79B, |
| | CDH1, CDH11, CDK12, CDK4, CDK6, CDKN2A, CDKN2a(p14), CDKN2C, CDX2, |
| | CEBPA, CEP1, CHCHD7, CHEK2, CHIC2, CHN1, CIC, CIITA, CLTC, CLTCL1, |
| | CMKOR1, COL1A1, COPEB, COX6C, CREB1, CREB3L1, CREB3L2, CREBBP, CRLF2, |
| | CRTC3, CTNNB1, CYLD, D10S170, DAXX, DDB2, DDIT3, DDX10, DDX5, DDX6, |
| | DEK, DICER1, DNMT3A, DUX4, EBF1, EGFR, EIF4A2, ELF4, ELK4, ELKS, ELL, ELN, |
| | EML4, EP300, EPS15, ERBB2, ERCC2, ERCC3, ERCC4, ERCC5, ERG, ETV1, ETV4, |
| | ETV5, ETV6, EVI1, EWSR1, EXT1, EXT2, EZH2, FACL6, FAM22A, FAM22B, FAM46C, |
| | FANCA, FANCC, FANCD2, FANCE, FANCF, FANCG, FBXO11, FBXW7, FCGR2B, |
| | FEV, FGFR1, FGFR1OP, FGFR2, FGFR3, FH, FHIT, FIP1L1, FLI1, FLJ27352, FLT3, |
| | FNBP1, FOXL2, FOXO1A, FOXO3A, FOXP1, FSTL3, FUBP1, FUS, FVT1, GAS7, |
| | GATA1, GATA2, GATA3, GMPS, GNA11, GNAQ, GNAS, GOLGA5, GOPC, GPC3, |
| | GPHN, GRAF, HCMOGT-1, HEAB, HERPUD1, HEY1, HIP1, HIST1H4I, HLF, HLXB9, |
| | HMGA1, HMGA2, HNRNPA2B1, HOOK3, HOXA11, HOXA13, HOXA9, HOXC11, |
| | HOXC13, HOXD11, HOXD13, HRAS, HRPT2, HSPCA, HSPCB, IDH1, IDH2, IGH@, |
| | IGK@, IGL@, IKZF1, IL2, IL21R, IL6ST, IL7R, IRF4, IRTA1, ITK, JAK1, JAK2, JAK3, |
| | JAZF1, JUN, KDM5A, KDM5C, KDM6A, KDR, KIAA1549, KIT, KLK2, KRAS, KTN1, |
| | LAF4, LASP1, LCK, LCP1, LCX, LHFP, LIFR, LMO1, LMO2, LPP, LYL1, MADH4, |
| | MAF, MAFB, MALT1, MAML2, MAP2K4, MDM2, MDM4, MDS1, MDS2, MECT1, |
| | MED12, MEN1, MET, MITF, MKL1, MLF1, MLH1, MLL, MLL2, MLL3, MLLT1, |
| | MLLT10, MLLT2, MLLT3, MLLT4, MLLT6, MLLT7, MN1, MPL, MSF, MSH2, MSH6, |
| | MSI2, MSN, MTCP1, MUC1, MUTYH, MYB, MYC, MYCL1, MYCN, MYD88, MYH11, |
| | MYH9, MYST4, NACA, NBS1, NCOA1, NCOA2, NCOA4, NDRG1, NF1, NF2, NFE2L2, |
| | NFIB, NFKB2, NIN, NKX2-1, NONO, NOTCH1, NOTCH2, NPM1, NR4A3, NRAS, |
| | NSD1, NTRK1, NTRK3, NUMA1, NUP214, NUP98, OLIG2, OMD, P2RY8, PAFAH1B2, |
| | PALB2, PAX3, PAX5, PAX7, PAX8, PBRM1, PBX1, PCM1, PCSK7, PDE4DIP, PDGFB, |
| | PDGFRA, PDGFRB, PER1, PHOX2B, PICALM, PIK3CA, PIK3R1, PIM1, PLAG1, PML, |
| | PMS1, PMS2, PMX1, PNUTL1, POU2AF1, POU5F1, PPARG, PPP2R1A, PRCC, PRDM1, |
| | PRDM16, PRF1, PRKAR1A, PRO1073, PSIP2, PTCH, PTEN, PTPN11, RAB5EP, |
| | RAD51L1, RAF1, RALGDS, RANBP17, RAP1GDS1, RARA, RB1, RBM15, RECQL4, |
| | REL, RET, ROS1, RPL22, RPN1, RUNDC2A, RUNX1, RUNXBP2, SBDS, SDH5, SDHB, |
| | SDHC, SDHD, SEPT6, SET, SETD2, SF3B1, SFPQ, SFRS3, SH3GL1, SIL, SLC45A3, |
| | SMARCA4, SMARCB1, SMO, SOCS1, SOX2, SRGAP3, SRSF2, SS18, SS18L1, |
| | SSH3BP1, SSX1, SSX2, SSX4, STK11, STL, SUFU, SUZ12, SYK, TAF15, TAL1, TAL2, |
| | TCEA1, TCF1, TCF12, TCF3, TCF7L2, TCL1A, TCL6, TET2, TFE3, TFEB, TFG, TFPT, |
| | TFRC, THRAP3, TIF1, TLX1, TLX3, TMPRSS2, TNFAIP3, TNFRSF14, TNFRSF17, |
| | TNFRSF6, TOP1, TP53, TPM3, TPM4, TPR, TRA@, TRB@, TRD@, TRIM27, TRIM33, |
| | TRIP11, TSC1, TSC2, TSHR, TTL, U2AF1, USP6, VHL, VTI1A, WAS, WHSC1, |
| | WHSC1L1, WIF1, WRN, WT1, WTX, XPA, XPC, XPO1, YWHAE, ZNF145, ZNF198, |
| | ZNF278, ZNF331, ZNF384, ZNF521, ZNF9, ZRSR2 |
| Known Cancer | AR, androgen receptor; ARPC1A, actin-related protein complex 2/3 subunit A; AURKA, |
| Genes | Aurora kinase A; BAG4, BCl-2 associated anthogene 4; BCl2l2, BCl-2 like 2; BIRC2, |
| | Baculovirus IAP repeat containing protein 2; CACNA1E, calcium channel voltage dependent |
| | alpha-1E subunit; CCNE1, cyclin E1; CDK4, cyclin dependent kinase 4; CHD1L, |
| | chromodomain helicase DNA binding domain 1-like; CKS1B, CDC28 protein kinase 1B; |
| | COPS3, COP9 subunit 3; DCUN1D1, DCN1 domain containing protein 1; DYRK2, dual |
| | specificity tyrosine phosphorylation regulated kinase 2; EEF1A2, eukaryotic elongation |
| | transcription factor 1 alpha 2; EGFR, epidermal growth factor receptor; FADD, Fas- |
| | associated via death domain; FGFR1, fibroblast growth factor receptor 1, GATA6, GATA |
| | binding protein 6; GPC5, glypican 5; GRB7, growth factor receptor bound protein 7; |
| | MAP3K5, mitogen activated protein kinase kinase kinase 5; MED29, mediator complex |
| | subunit 5; MITF, microphthalmia associated transcription factor; MTDH, metadherin; |
| | NCOA3, nuclear receptor coactivator 3; NKX2-1, NK2 homeobox 1; PAK1, |
| | p21/CDC42/RAC1-activated kinase 1; PAX9, paired box gene 9; PIK3CA, |
| | phosphatidylinositol-3 kinase catalytic a; PLA2G10, phopholipase A2, group X; PPM1D, |
| | protein phosphatase magnesium-dependent 1D; PTK6, protein tyrosine kinase 6; PRKCI, |
| | protein kinase C iota; RPS6KB1, ribosomal protein s6 kinase 70 kDa; SKP2, s-phase kinase |
| | associated protein; SMURF1, sMAD specific E3 ubiquitin protein ligase 1; SHH, sonic |
| | hedgehog homologue; STARD3, sTAR-related lipid transfer domain containing protein 3; |
| | YWHAQ, tyrosine 3-monooxygenase/tryptophan 5-monooxygenase activation protein, zeta |
| | isoform; ZNF217, zinc finger protein 217 |
| Mitotic Related | Aurora kinase A (AURKA); Aurora kinase B (AURKB); Baculoviral IAP repeat-containing |
| Cancer Genes | 5, survivin (BIRC5); Budding uninhibited by benzimidazoles 1 homolog (BUB1); Budding |
| | uninhibited by benzimidazoles 1 homolog beta, BUBR1 (BUB1B); Budding uninhibited by |
| | benzimidazoles 3 homolog (BUB3); CDC28 protein kinase regulatory subunit 1B (CKS1B); |
| | CDC28 protein kinase regulatory subunit 2 (CKS2); Cell division cycle 2 (CDC2)/CDK1 |
| | Cell division cycle 20 homolog (CDC20); Cell division cycle-associated 8, borealin |
| | (CDCA8); Centromere protein F, mitosin (CENPF); Centrosomal protein 110 kDa (CEP110); |
| | Checkpoint with forkhead and ring finger domains (CHFR); Cyclin B1 (CCNB1); Cyclin B2 |
| | (CCNB2); Cytoskeleton-associated protein 5 (CKAP5/ch-TOG); Microtubule-associated |
| | protein RP/EB family member 1. End-binding protein 1, EB1 (MAPRE1); Epithelial cell |
| | transforming sequence 2 oncogene (ECT2); Extra spindle poles like 1, separase (ESPL1); |
| | Forkhead box M1 (FOXM1); H2A histone family, member X (H2AFX); Kinesin family |
| | member 4A (KIF4A); Kinetochore-associated 1 (KNTC1/ROD); Kinetochore-associated 2; |
| | highly expressed in cancer 1 (KNTC2/HEC1); Large tumor suppressor, homolog 1 (LATS1); |
| | Large tumor suppressor, homolog 2 (LATS2); Mitotic arrest deficient-like 1; MAD1 |
| | (MAD1L1); Mitotic arrest deficient-like 2; MAD2 (MAD2L1); Mps1 protein kinase (TTK); |
| | Never in mitosis gene a-related kinase 2 (NEK2); Ninein, GSKSb interacting protein (NIN); |
| | Non-SMC condensin I complex, subunit D2 (NCAPD2/CNAP1); Non-SMC condensin I |
| | complex, subunit H (NACPH/CAPH); Nuclear mitotic apparatus protein 1 (NUMA1); |
| | Nucleophosmin (nucleolar phosphoprotein B23, numatrin); (NPM1); Nucleoporin (NUP98); |
| | Pericentriolar material 1 (PCM1); Pituitary tumor-transforming 1, securin (PTTG1); Polo-like |
| | kinase 1 (PLK1); Polo-like kinase 4 (PLK4/SAK); Protein (peptidylprolyl cis/trans |
| | isomerase) NIMA-interacting 1 (PIN1); Protein regulator of cytokinesis 1 (PRC1); RAD21 |
| | homolog (RAD21); Ras association (RalGDS/AF-6); domain family 1 (RASSF1); Stromal |
| | antigen 1 (STAG1); Synuclein-c, breast cancer-specific protein 1 (SNCG, BCSG1); |
| | Targeting protein for Xklp2 (TPX2); Transforming, acidic coiled-coil containing protein 3 |
| | (TACC3); Ubiquitin-conjugating enzyme E2C (UBE2C); Ubiquitin-conjugating enzyme E2I |
| | (UBE2I/UBC9); ZW10 interactor, (ZWINT); ZW10, kinetochore-associated homolog |
| | (ZW10); Zwilch, kinetochore-associated homolog (ZWILCH) |
| Ribonucleoprotein | Argonaute family member, Ago1, Ago2, Ago3, Ago4, GW182 (TNRC6A), TNRC6B, |
| complexes | TNRC6C, HNRNPA2B1, HNRPAB, ILF2, NCL (Nucleolin), NPM1 (Nucleophosmin), |
| | RPL10A, RPL5, RPLP1, RPS12, RPS19, SNRPG, TROVE2, apolipoprotein, apolipoprotein |
| | A, apo A-I, apo A-II, apo A-IV, apo A-V, apolipoprotein B, apo B48, apo B100, |
| | apolipoprotein C, apo C-I, apo C-II, apo C-III, apo C-IV, apolipoprotein D (ApoD), |
| | apolipoprotein E (ApoE), apolipoprotein H (ApoH), apolipoprotein L, APOL1, APOL2, |
| | APOL3, APOL4, APOL5, APOL6, APOLD1 |
| Cytokine Receptors | 4-1BB, ALCAM, B7-1, BCMA, CD14, CD30, CD40 Ligand, CEACAM-1, DR6, Dtk, |
| | Endoglin, ErbB3, E-Selectin, Fas, Flt-3L, GITR, HVEM, ICAM-3, IL-1 R4, IL-1 RI, IL-10 |
| | Rbeta, IL-17R, IL-2Rgamma, IL-21R, LIMPII, Lipocalin-2, L-Selectin, LYVE-1, MICA, |
| | MICB, NRG1-betal, PDGF Rbeta, PECAM-1, RAGE, TIM-1, TRAIL R3, Trappin-2, uPAR, |
| | VCAM-1, XEDAR |
| Prostate and | ErbB3, RAGE, Trail R3 |
| colorectal cancer | |
| vesicles | |
| Colorectal cancer | IL-1 alpha, CA125, Filamin, Amyloid A |
| vesicles | |
| Colorectal cancer v | Involucrin, CD57, Prohibitin, Thrombospondin, Laminin B1/b1, Filamin, 14.3.3 gamma, |
| adenoma vesicles | 14.3.3 Pan |
| Colorectal | Involucrin, Prohibitin, Laminin B1/b1, IL-3, Filamin, 14.3.3 gamma, 14.3.3 Pan, MMP-15/ |
| adenoma vesicles | MT2-MMP, hPL, Ubiquitin, and mRANKL |
| Brain cancer | Prohibitin, CD57, Filamin, CD18, b-2-Microglobulin, IL-2, IL-3, CD16, p170, Keratin 19, |
| vesicles | Pds1, Glicentin, SRF (Serum Response Factor), E3-binding protein (ARM1), Collagen II, |
| | SRC1 (Steroid Receptor Coactivator-1) Ab-1, Caldesmon, GFAP, TRP75/gp75, alpha-1- |
| | antichymotrypsin, Hepatic Nuclear Factor-3B, FLAP, Tyrosinase, NF kappa B/p50, |
| | Melanoma (gp100), Cyclin E, 6-Histidine, Mucin 3 (MUC3), TdT, CD21, XPA, Superoxide |
| | Dismutase, Glycogen Synthase Kinase 3b (GSK3b), CD54/ICAM-1, Thrombospondin, Gai1, |
| | CD79a mb-1, IL-1 beta, Cytochrome c, RAD1, bcl-X, CD50/ICAM-3, Neurofilament, |
| | Alkaline Phosphatase (AP), ER Ca+2 ATPase2, PCNA, F.VIII/VWF, SV40 Large T Antigen, |
| | Paxillin, Fascin, CD165, GRIP1, Cdk8, Nucleophosmin (NPM), alpha-1-antitrypsin, |
| | CD32/Fcg Receptor II, Keratin 8 (phospho-specific Ser73), DR5, CD46, TID-1, MHC II |
| | (HLA-DQ), Plasma Cell Marker, DR3, Calmodulin, AIF (Apoptosis Inducing Factor), DNA |
| | Polymerase Beta, Vitamin D Receptor (VDR), Bcl10/CIPER/CLAP/mE10, Neuron |
| | Specific Enolase, CXCR4/Fusin, Neurofilament (68 kDa), PDGFR, beta, Growth Hormone |
| | (hGH), Mast Cell Chymase, Ret Oncoprotein, and Phosphotyrosine |
| Melanoma vesicles | Caspase 5, Thrombospondin, Filamin, Ferritin, 14.3.3 gamma, 14.3.3 Pan, CD71/Transferrin |
| | Receptor, and Prostate Apoptosis Response Protein-4 |
| Head and neck | 14.3.3 Pan, Filamin, 14.3.3 gamma, CD71/Transferrin Receptor, CD30, Cdk5, CD138, |
| cancer vesicles | Thymidine Phosphorylase, Ruv 5, Thrombospondin, CD1, Von Hippel-Lindau Protein, |
| | CD46, Rad51, Ferritin, c-Abl, Actin, Muscle Specific, LewisB |
| Membrane proteins | carbonic anhydrase IX, B7, CCCL19, CCCL21, CSAp, HER-2/neu, BrE3, CD1, CD1a, CD2, |
| | CD3, CD4, CD5, CD8, CD11A, CD14, CD15, CD16, CD18, CD19, CD20, CD21, CD22, |
| | CD23, CD25, CD29, CD30, CD32b, CD33, CD37, CD38, CD40, CD40L, CD44, CD45, |
| | CD46, CD52, CD54, CD55, CD59, CD64, CD67, CD70, CD74, CD79a, CD80, CD83, |
| | CD95, CD126, CD133, CD138, CD147, CD154, CEACAM5, CEACAM-6, alpha-fetoprotein |
| | (AFP), VEGF, ED-B fibronectin, EGP-1, EGP-2, EOF receptor (ErbB1), ErbB2, ErbB3, |
| | Factor H, FHL-1, Flt-3, folate receptor, Ga 733,GROB, HMGB-1, hypoxia inducible factor |
| | (HIF), HM1.24, HER-2/neu, insulin-like growth factor (ILGF), IFN-γ, IFN-α, IL-β, IL-2R, |
| | IL-4R, IL-6R, IL-13R, IL-15R, IL-17R, IL-18R, IL-2, IL-6, IL-8, IL-12, IL-15, IL-17, IL-18, |
| | IL-25, IP-10, IGF-1R, Ia, HM1.24, gangliosides, HCG, HLA-DR, CD66a-d, MAGE, mCRP, |
| | MCP-1, MIP-1A, MIP-1B, macrophage migration-inhibitory factor (MIF), MUC1, MUC2, |
| | MUC3, MUC4, MUC5, placental growth factor (P1GF), PSA (prostate-specific antigen), |
| | PSMA, PSMA dimer, PAM4 antigen, NCA-95, NCA-90, A3, A33, Ep-CAM, KS-1, Le(y), |
| | mesothelin, S100, tenascin, TAC, Tn antigen, Thomas-Friedenreich antigens, tumor necrosis |
| | antigens, tumor angiogenesis antigens, TNF-α, TRAIL receptor (R1 and R2), VEGFR, |
| | RANTES, T101, cancer stem cell antigens, complement factors C3, C3a, C3b, C5a, C5 |
| Cluster of | CD1, CD2, CD3, CD4, CD5, CD6, CD7, CD8, CD9, CD10, CD11a, CD11b, CD11c, |
| Differentiation | CD12w, CD13, CD14, CD15, CD16, CDw17, CD18, CD19, CD20, CD21, CD22, CD23, |
| (CD) proteins | CD24, CD25, CD26, CD27, CD28, CD29, CD30, CD31, CD32, CD33, CD34, CD35, CD36, |
| | CD37, CD38, CD39, CD40, CD41, CD42, CD43, CD44, CD45, CD46, CD47, CD48, |
| | CD49a, CD49b, CD49c, CD49d, CD49e, CD49f, CD53, CD54, CD55, CD56, CD57, CD58, |
| | CD59, CD61, CD62E, CD62L, CD62P, CD63, CD68, CD69, CD71, CD72, CD73, CD74, |
| | CD80, CD81, CD82, CD83, CD86, CD87, CD88, CD89, CD90, CD91, CD95, CD96, |
| | CD100, CD103, CD105, CD106, CD107, CD107a, CD107b, CD109, CD117, CD120, |
| | CD127, CD133, CD134, CD135, CD138, CD141, CD142, CD143, CD144, CD147, CD151, |
| | CD152, CD154, CD156, CD158, CD163, CD165, CD166, CD168, CD184, CDw186, |
| | CD195, CD197, CD209, CD202a, CD220, CD221, CD235a, CD271, CD303, CD304, |
| | CD309, CD326 |
| Interleukin (IL) | IL-1, IL-2, IL-3, IL-4, IL-5, IL-6, IL-7, IL-8 or CXCL8, IL-9, IL-10, IL-11, IL-12, IL-13, IL- |
| proteins | 14, IL-15, IL-16, IL-17, IL-18, IL-19, IL-20, IL-21, IL-22, IL-23, IL-24, IL-25, IL-26, IL-27, |
| | IL-28, IL-29, IL-30, IL-31, IL-32, IL-33, IL-35, IL-36 |
| IL receptors | CD121a/IL1R1, CD121b/IL1R2, CD25/IL2RA, CD122/IL2RB, CD132/IL2RG, |
| | CD123/IL3RA, CD131/IL3RB, CD124/IL4R, CD132/IL2RG, CD125/IL5RA, |
| | CD131/IL3RB, CD126/IL6RA, CD130/IR6RB, CD127/IL7RA, CD132/IL2RG, |
| | CXCR1/IL8RA, CXCR2/IL8RB/CD128, CD129/IL9R, CD210/IL10RA, |
| | CDW210B/IL10RB, IL11RA, CD212/IL12RB1, IR12RB2, IL13R, IL15RA, CD4, |
| | CDw217/IL17RA, IL17RB, CDw218a/IL18R1, IL20R, IL20R, IL21R, IL22R, IL23R, |
| | IL20R, LY6E, IL20R1, IL27RA, IL28R, IL31RA |
| Mucin (MUC) | MUC1, MUC2, MUC3A, MUC3B, MUC4, MUC5AC, MUC5B, MUC6, MUC7, MUC8, |
| proteins | MUC12, MUC13, MUC15, MUC16, MUC17, MUC19, and MUC20 |
| MUC1 isoforms | mucin-1 isoform 2 precursor or mature form (NP_001018016.1), mucin-1 isoform 3 |
| | precursor or mature form (NP_001018017.1), mucin-1 isoform 5 precursor or mature form |
| | (NP_001037855.1), mucin-1 isoform 6 precursor or mature form (NP_001037856.1), mucin- |
| | 1 isoform 7 precursor or mature form (NP_001037857.1), mucin-1 isoform 8 precursor or |
| | mature form (NP_001037858.1), mucin-1 isoform 9 precursor or mature form |
| | (NP_001191214.1), mucin-1 isoform 10 precursor or mature form (NP_001191215.1), |
| | mucin-1 isoform 11 precursor or mature form (NP_001191216.1), mucin-1 isoform 12 |
| | precursor or mature form (NP_001191217.1), mucin-1 isoform 13 precursor or mature form |
| | (NP_001191218.1), mucin-1 isoform 14 precursor or mature form (NP_001191219.1), |
| | mucin-1 isoform 15 precursor or mature form (NP_001191200.1), mucin-1 isoform 16 |
| | precursor or mature form (NP_001191201.1), mucin-1 isoform 17 precursor or mature form |
| | (NP_001191202.1), mucin-1 isoform 18 precursor or mature form (NP_001191203.1), |
| | mucin-1 isoform 19 precursor or mature form (NP_001191204.1), mucin-1 isoform 20 |
| | precursor or mature form (NP_001191205.1), mucin-1 isoform 21 precursor or mature form |
| | (NP_001191206.1), mucin-1 isoform 1 precursor or mature form (NP_002447.4), |
| | ENSP00000357380, ENSP00000357377, ENSP00000389098, ENSP00000357374, |
| | ENSP00000357381, ENSP00000339690, ENSP00000342814, ENSP00000357383, |
| | ENSP00000357375, ENSP00000338983, ENSP00000343482, ENSP00000406633, |
| | ENSP00000388172, ENSP00000357378, P15941-1, P15941-2, P15941-3, P15941-4, |
| | P15941-5, P15941-6, P15941-7, P15941-8, P15941-9, P15941-10, secreted isoform, |
| | membrane bound isoform, CA 27.29 (BR 27.29), CA 15-3, PAM4 reactive antigen, |
| | underglycosylated isoform, unglycosylated isoform, CanAg antigen |
| MUC1 interacting | ABL1, SRC, CTNND1, ERBB2, GSK3B, JUP, PRKCD, APC, GALNT1, GALNT10, |
| proteins | GALNT12, JUN, LCK, OSGEP, ZAP70, CTNNB1, EGFR, SOS1, ERBB3, ERBB4, GRB2, |
| | ESR1, GALNT2, GALNT4, LYN, TP53, C1GALT1, C1GALT1C1, GALNT3, GALNT6, |
| | GCNT1, GCNT4, MUC12, MUC13, MUC15, MUC17, MUC19, MUC2, MUC20, MUC3A, |
| | MUC4, MUC5B, MUC6, MUC7, MUCL1, ST3GAL1, ST3GAL3, ST3GAL4, |
| | ST6GALNAC2, B3GNT2, B3GNT3, B3GNT4, B3GNT5, B3GNT7, B4GALT5, GALNT11, |
| | GALNT13, GALNT14, GALNT5, GALNT8, GALNT9, ST3GAL2, ST6GAL1, |
| | ST6GALNAC4, GALNT15, MYOD1, SIGLEC1, IKBKB, TNFRSF1A, IKBKG, MUC1 |
| Tumor markers | Alphafetoprotein (AFP), Carcinoembryonic antigen (CEA), CA-125, MUC-1, Epithelial |
| | tumor antigen (ETA), Tyrosinase, Melanoma-associated antigen (MAGE), p53 |
| Tumor markers | Alpha fetoprotein (AFP), CA15-3, CA27-29, CA19-9, CA-125, Calretinin, |
| | Carcinoembryonic antigen, CD34, CD99, CD117, Chromogranin, Cytokeratin (various |
| | types), Desmin, Epithelial membrane protein (EMA), Factor VIII, CD31 FL1, Glia1 fibrillary |
| | acidic protein (GFAP), Gross cystic disease fluid protein (GCDFP-15), HMB-45, Human |
| | chorionic gonadotropin (hCG), immunoglobulin, inhibin, keratin (various types), PTPRC |
| | (CD45), lymphocyte marker (various types, MART-1 (Melan-A), Myo D1, muscle-specific |
| | actin (MSA), neurofilament, neuron-specific enolase (NSE), placental alkaline phosphatase |
| | (PLAP), prostate-specific antigen, S100 protein, smooth muscle actin (SMA), synaptophysin, |
| | thyroglobulin, thyroid transcription factor-1, Tumor M2-PK, vimentin |
| Cell adhesion | Immunoglobulin superfamily CAMs (IgSF CAMs), N-CAM (Myelin protein zero), ICAM (1, |
| molecule (CAMs) | 5), VCAM-1, PE-CAM, L1-CAM, Nectin (PVRL1, PVRL2, PVRL3), Integrins, LFA-1 |
| | (CD11a + CD18), Integrin alphaXbeta2 (CD11c + CD18), Macrophage-1 antigen |
| | (CD11b + CD18), VLA-4 (CD49d + CD29), Glycoprotein IIb/IIIa (ITGA2B + ITGB3), |
| | Cadherins, CDH1, CDH2, CDH3, Desmosomal, Desmoglein (DSG1, DSG2, DSG3, DSG4), |
| | Desmocollin (DSC1, DSC2, DSC3), Protocadherin, PCDH1, T-cadherin, CDH4, CDH5, |
| | CDH6, CDH8, CDH11, CDH12, CDH15, CDH16, CDH17, CDH9, CDH10, Selectins, E- |
| | selectin, L-selectin, P-selectin, Lymphocyte homing receptor: CD44, L-selectin, integrin |
| | (VLA-4, LFA-1), Carcinoembryonic antigen (CEA), CD22, CD24, CD44, CD146, CD164 |
| Annexins | ANXA1; ANXA10; ANXA11; ANXA13; ANXA2; ANXA3; ANXA4; ANXA5; ANXA6; |
| | ANXA7; ANXA8; ANXA8L1; ANXA8L2; ANXA9 |
| Cadherins | CDH1, CDH2, CDH12, CDH3, Deomoglein, DSG1, DSG2, DSG3, DSG4, Desmocollin, |
| (“calcium- | DSC1, DSC2, DSC3, Protocadherins, PCDH1, PCDH10, PCDH11x, PCDH11y, PCDH12, |
| dependent | FAT, FAT2, FAT4, PCDH15, PCDH17, PCDH18, PCDH19; PCDH20; PCDH7, PCDH8, |
| adhesion”) | PCDH9, PCDHA1, PCDHA10, PCDHA11, PCDHA12, PCDHA13, PCDHA2, PCDHA3, |
| | PCDHA4, PCDHA5, PCDHA6, PCDHA7, PCDHA8, PCDHA9, PCDHAC1, PCDHAC2, |
| | PCDHB1, PCDHB10, PCDHB11, PCDHB12, PCDHB13, PCDHB14, PCDHB15, |
| | PCDHB16, PCDHB17, PCDHB18, PCDHB2, PCDHB3, PCDHB4, PCDHB5, PCDHB6, |
| | PCDHB7, PCDHB8, PCDHB9, PCDHGA1, PCDHGA10, PCDHGA11, PCDHGA12, |
| | PCDHGA2; PCDHGA3, PCDHGA4, PCDHGA5, PCDHGA6, PCDHGA7, PCDHGA8, |
| | PCDHGA9, PCDHGB1, PCDHGB2, PCDHGB3, PCDHGB4, PCDHGB5, PCDHGB6, |
| | PCDHGB7, PCDHGC3, PCDHGC4, PCDHGC5, CDH9 (cadherin 9, type 2 (T1-cadherin)), |
| | CDH10 (cadherin 10, type 2 (T2-cadherin)), CDH5 (VE-cadherin (vascular endothelial)), |
| | CDH6 (K-cadherin (kidney)), CDH7 (cadherin 7, type 2), CDH8 (cadherin 8, type 2), |
| | CDH11 (OB-cadherin (osteoblast)), CDH13 (T-cadherin - H-cadherin (heart)), CDH15 (M- |
| | cadherin (myotubule)), CDH16 (KSP-cadherin), CDH17 (LI cadherin (liver-intestine)), |
| | CDH18 (cadherin 18, type 2), CDH19 (cadherin 19, type 2), CDH20 (cadherin 20, type 2), |
| | CDH23 (cadherin 23, (neurosensory epithelium)), CDH10, CDH11, CDH13, CDH15, |
| | CDH16, CDH17, CDH18, CDH19, CDH20, CDH22, CDH23, CDH24, CDH26, CDH28, |
| | CDH4, CDH5, CDH6, CDH7, CDH8, CDH9, CELSR1, CELSR2, CELSR3, CLSTN1, |
| | CLSTN2, CLSTN3, DCHS1, DCHS2, LOC389118, PCLKC, RESDA1, RET |
| ECAD (CDH1) | SNAI1/SNAIL, ZFHX1B/SIP1, SNAI2/SLUG, TWIST1, DeltaEF1 |
| downregulators | |
| ECAD | AML1, p300, HNF3 |
| upregulators | |
| ECAD interacting | ACADVL, ACTG1, ACTN1, ACTN4, ACTR3, ADAM10, ADAM9, AJAP1, ANAPC1, |
| proteins | ANAPC11, ANAPC4, ANAPC7, ANK2, ANP32B, APC2, ARHGAP32, ARPC2, ARVCF, |
| | BOC, C1QBP, CA9, CASP3, CASP8, CAV1, CBLL1, CCNB1, CCND1, CCT6A, CDC16, |
| | CDC23, CDC26, CDC27, CDC42, CDH2, CDH3, CDK5R1, CDON, CDR2, CFTR, |
| | CREBBP, CSE1L, CSNK2A1, CTNNA1, CTNNB1, CTNND1, CTNND2, DNAJA1, DRG1, |
| | EGFR, EP300, ERBB2, ERBB2IP, ERG, EZR, PER, FGFR1, FOXM1, FRMD5, FYN, |
| | GBAS, GNA12, GNA13, GNB2L1, GSK3B, HDAC1, HDAC2, HSP90AA1, HSPA1A, |
| | HSPA1B, HSPD1, IGHA1, IQGAP1, IRS1, ITGAE, ITGB7, JUP, KIFC3, KLRG1, KRT1, |
| | KRT9, LIMA1, LMNA, MAD2L2, MAGI1, MAK, MDM2, MET, MYO6, MYO7A, |
| | NDRG1, NEDD9, NIPSNAP1, NKD2, PHLPP1, PIP5K1C, PKD1, PKP4, PLEKHA7, |
| | POLR2E, PPP1CA, PRKD1, PSEN1, PTPN1, PTPN14, PTPRF, PTPRM, PTPRQ, PTTG1, |
| | PVR, PVRL1, RAB8B, RRM2, SCRIB, SET, SIX1, SKI, SKP2, SRC, TACC3, TAS2R13, |
| | TGM2, TJP1, TK1, TNS3, TTK, UBC, USP9X, VCL, VEZT, XRCC5, YAP1, YES1, |
| | ZC3HC1 |
| Epithelial- | SERPINA3, ACTN1, AGR2, AKAP12, ALCAM, AP1M2, AXL, BSPRY, CCL2, CDH1, |
| mesenchymal | CDH2, CEP170, CLDN3, CLDN4, CNN3, CYP4X1, DNMT3A, DSG3, DSP, EFNB2, EHF, |
| transition (EMT) | ELF3, ELF5, ERBB3, ETV5, FLRT3, FOSB, FOSL1, FOXC1, FX YD 5, GPDIL, HMGA1, |
| | HMGA2, HOPX, IFI16, IGFBP2, IHH, IKBIP, IL-11, IL-18, IL6, IL8, ITGA5, ITGB3, |
| | LAMB1, LCN2, MAP7, MB, MMP7, MMP9, MPZL2, MSLN, MTA3, MTSS1, OCLN, |
| | PCOLCE2, PECAM1, PLAUR, PLXNB1, PPL, PPP1R9A, RASSF8, SCNN1A, SERPINB2, |
| | SERPINE1, SFRP1, SH3YL1, SLC27A2, SMAD7, SNAI1, SNAI2, SPARC, SPDEF, SRPX, |
| | STAT5A, TBX2, TJP3, TMEM125, TMEM45B, TWIST1, VCAN, VIM, VWF, XBP1, |
| | YBX1, ZBTB10, ZEB1, ZEB2 |
| Vesicle Associated | ALB, C3, A2M, TF, APOB, KRT1, KRT10, FGA, IGHG1, SERPINA1, FOB, KRT2, HP, |
| | IGHG3, IGHA1, SERPINA3, C4A, IGKC, C4B, CP, IGHM, FGG, KRT9, IGHG2, FN1, |
| | CFH, SERPINC1, C4A, APOA1, GC, Ig mu heavy chain disease protein, IGHG4, HPX, |
| | IGHA2, IGLC2, ITIH1, KNG1, ITIH4, ITIH2, AGT, PLG, APOA4, KRT14, CFB, IGLC1, |
| | ITIH4, ORM1, ITIH4, AHSG, A1BG, IGLL5, SERPING1, Ig kappa chain V-I region DEE, |
| | APOE, Ig kappa chain V-I region OU, ORM2, AFM, Ig heavy chain V-III region BUT, |
| | C4BPA, KRT6A, SERPINF1, APCS, APOH, CLU, KRT5, Ig heavy chain V-III region BRO, |
| | Ig heavy chain V-III region GAL, HRG, Ig heavy chain V-III region CAM, VTN, |
| | SERPIND1, TTR, PON1, Ig heavy chain V-III region TIL, C1QC, SERPINA7, Ig kappa |
| | chain V-I region CAR, Ig kappa chain V-IV region Len, AMBP, KRT13, Ig kappa chain V- |
| | III region SIE, SERPINF2, Ig heavy chain V-III region VH26, C5, F2, IGKV4-1, C7, Ig |
| | kappa chain V-I region EU, Ig kappa chain V-III region NG9 (Fragment), GSN, LPA, LYZ, |
| | Ig kappa chain V-III region HAH, Ig lambda chain V-III region LOI, SERPINA6, AZGP1, |
| | C1S, CFHR1, C9, HRNR, APOL1, C1QB, Ig kappa chain V-I region Ni, Ig heavy chain V- |
| | III region WEA, Ig kappa chain V-II region TEW, SERPINA4, DCD, LRG1, GSN, RBP4, |
| | SMC3, PRSS3, IGJ, C6, SEPP1, HBA1, Ig kappa chain V-III region CLL, ABCF1, APOD, |
| | SERPINA5, PDE4D, C2, C8A, C1R, CD5L, CFHR2, FLG2, HBB, CFI, Ig kappa chain V-II |
| | region MIL, Ig heavy chain V-II region NEWM, C8G, Ig lambda chain V-III region SH, |
| | PGLYRP2, SBSN, Ig lambda chain V-I region WAH, Ig lambda chain V-IV region Hil, |
| | SAA4, F10, MASP1, SHROOM3, F13A1, Ig lambda chain V region 4A, GIT2, KLKB1, |
| | ATRN, Ig heavy chain V-I region HG3, ITIH3, CDK10, APOA2, Ig heavy chain V-II region |
| | OU, Ig heavy chain V-I region V35, UTF1, MAP1B, PAPLN, Ig kappa chain V-I region Lay, |
| | RNF207, VPS13D, CRYGN, HMCN1, SLC27A6, FN1, VWF, C8B, LGALS3BP, HP, |
| | PROS1, ECM1, HPR, LBP, HABP2, FCN2, KRT77, APOM, Ig kappa chain V-I region |
| | WEA, GC, PLA2G7, Ig kappa chain V-I region Scw, CFP, APOM, MASP1, IGKV1-5, F12, |
| | SERPINA1, F13B, FCN2, PCYOX1, C4BPB, LCAT, KRT73, Ig heavy chain V-III region |
| | GA, Ig kappa chain V-III region VG (Fragment), MBL2, EEF2, MAP3K6, EPHA5, APOC4, |
| | CAMP, SERPINA10, FCGBP, PCSK9, CPB2, CFHR5, SAFB2, C2CD4C, F5, NUP153, |
| | XYLT1, EP300, BMP8A, N4BP2, KRT4, KRT16, Ig kappa chain V-III region B6, KRT86, |
| | KRT85, ANXA1, KRT78, SPRR2E, CLU, CRNN, ARHGEF17, SPRR3, FN1, ARHGAP30, |
| | ACTG2, SFTPA1, CDC5L, FN1, IGLC7, FLG, SERPINA1, Ig heavy chain V-III region |
| | TUR, JUP, DSP, KNG1, KPRP, LCE1C, Ig heavy chain V-II region ARH-77, Ig kappa chain |
| | V-III region POM, FBLN1, C1QA, FCN3, Ig lambda chain V-IV region Bau, Ig lambda |
| | chain V-VI region WLT, UPF3A, SERPINF2, XIRP2, CFB, SERPINA3, DSG1, TTN, |
| | LRRCC1, MYO15A, ANKRD28, Ig heavy chain V-III region HIL, KIT, DNMT1, PLXND1, |
| | Ig kappa chain V-I region Mev, IGHD, RCBTB1, BCO1, KRT6B, KRT13, Ig kappa chain V- |
| | II region RPMI 6410, Ig kappa chain V-IV region B17, ACTB, FN1, SARDH, GK, EMC4, |
| | MED30, PIGR, HSPB1, DSP, VEPH1, SNX27, LRRC53, SIGLEC16, F9, Ig heavy chain V- |
| | III region TRO, APOC3, TOP2A, FLYWCH1, ACTL10 |
| Vesicle Associated | KRT6A, DSP, KRT6B, ACTB, FLG, IVL, SFN, KRT77, LMNA, KRT15, LGALS7, |
| | HSPA8, EPPK1, HSPA1A, DSG1, GSN, HIST1H2BK, EEF1A1, RPLP2, KRT74, YWHAB, |
| | PKP1, JUP, HNRNPA1, HSP90AA1, HIST1H2AH, GAPDH, HIST1H1E, HSPB1, |
| | CALML5, DCD, YWHAQ, VCP, AHNAK, SFPQ, PLEC, SERBP1, P4HB, PPL, Ig lambda |
| | chain V-IV region Hil, EIF3B, HSPA5, C3, TUBB4A, IGHG1, RPS3A, PPIA, SPTBN2, |
| | PDIA3, KRT80, DBNL, RPL29, RPL3, ANXA2P2, TPI1, RDX, H1F0, PGAM2, IGLC2, |
| | EVPL, ENO1, HNRNPA2B1, RPL7A, MYL6, ANXA1, TRIM29, RPS19, POF1B, RPL6, |
| | MORC2, RTN4, CA/CK E, LYZ, ZDBF2, IGKC, Ig heavy chain V-III region TIL, C4BPA, |
| | ACTB, LCE1C, IGHG3, SHOX2, KRT17, KRT77, KRT80, PIGR, KNG1, DSG1, DSP, |
| | SHROOM3, FGA, KPRP, DUSP27, LCE1C, SARDH, LYZ, SHISA5, HSP90AB1, EEF1A1, |
| | FGB, SHROOM3, IGLC2, KRT85, BMP8A, LCE2B, KRT6A, IGKC, S100A9, EEF1A1, |
| | C3, DCD, S100A8, LCE1C, ALB, IGLC2, S100A9, HSP90AB1, ACTB, KRT5, Ig kappa |
| | chain V-II region MIL, HRNR, IGHG1, HIST1H4A, DEFA1, LYZ, C3, SHROOM3, Ig |
| | kappa chain V-IV region STH (Fragment), Ig lambda chain V-I region HA, IGHA2, SARDH, |
| | H3F3C, LTF, TF |
| Vesicle Associated | C3, A2M, APOB, IGKC, C4A, C4B, FGB, ALB, CFH, IGHG1, FGA, FN1, PLG, IGHM, |
| | FGG, TF, C5, CP, IGHG2, IGLC2, Ig mu heavy chain disease protein, ITIH1, PZP, IGHG3, |
| | IGLL5, HP, C4BPA, ITIH2, IGHA1, KRT1, KRT10, APOE, Ig kappa chain V-I region DEE, |
| | AMBP, F2, C7, C6, ITIH4, CFB, IGHG4, APOH, APOA1, CD5L, C1R, HPR, Ig kappa |
| | chain V-I region Scw, IGHA2, CFHR1, KRT2, Ig kappa chain V-III region SIE, HRG, Ig |
| | heavy chain V-III region BRO, C1QB, GC, Ig heavy chain V-III region TIL, Ig kappa chain |
| | V-III region NG9 (Fragment), Ig heavy chain V-III region BUT, Ig heavy chain V-III region |
| | TUR, C9, SERPIND1, Ig kappa chain V-I region WEA, Ig kappa chain V-I region Ni, Ig |
| | kappa chain V-IV region Len, Ig kappa chain V-I region EU, Ig kappa chain V-II region |
| | TEW, Ig heavy chain V-III region GAL, KNG1, VTN, C8B, Ig lambda chain V-III region |
| | LOI, Ig heavy chain V-II region NEWM, APCS, KLKB1, CFI, PROS1, LPA, KRT9, |
| | SERPINA1, Ig lambda chain V-III region SH, C8A, Ig kappa chain V-III region B6, Ig |
| | lambda chain V-IV region Hil, Ig kappa chain V-III region CLL, C1S, FCN3, SERPINC1, Ig |
| | kappa chain V-I region Mev, IGHD, C1QC, HPX, C8G, IGKV1-5, Ig kappa chain V-I region |
| | Wes, Ig heavy chain V-III region WEA, A1BG, GSN, FBLN1, HBB, ITIH3, F12, |
| | SERPINA3, APOC3, Ig kappa chain V-I region BAN, Ig kappa chain V-III region VH |
| | (Fragment), F13B, IGKV4-1, SERPINF2, CLU, HIST1H1D, PON1, IGJ, Ig kappa chain V- |
| | III region POM, Ig heavy chain V-III region CAM, Ig heavy chain V-III region BUR, Ig |
| | kappa chain V-III region VG (Fragment), APOD, Ig lambda chain V-IV region MOL, Ig |
| | heavy chain V-III region GAR, FCGBP, APOM, F13A1, Ig heavy chain V-I region HG3, |
| | C1QA, Ig lambda chain V-VI region WLT, C2, C4BPB, CFP, SERPINA4, SAA4, |
| | SERPINF1, LGALS3BP, HABP2, RCBTB1, APOL1, KCNQ2, F9, Ig heavy chain V-III |
| | region TRO, Ig heavy chain V-III region HIL, Ig heavy chain V-II region OU, APOA2, F11, |
| | Ig lambda chain V-I region WAH, Ig lambda chain V region 4A, Ig kappa chain V-II region |
| | RPMI 6410, Ig kappa chain V-III region IARC/BL41, KRT5, IGLL1, Ig heavy chain V-I |
| | region V35, HBA1, ADIPOQ, PGLYRP2, UPF3A, BCO1, ARFGAP3, SARDH, SERPINA1, |
| | KNG1, Ig kappa chain V-I region Kue, Ig kappa chain V-I region Lay, Ig kappa chain V-I |
| | region OU, Ig kappa chain V-II region MIL, Ig heavy chain V-III region VH26, Ig heavy |
| | chain V-III region GA, FN1, TTR, SERPING1, APOA4, PRSS1, ANXA6, CFTR, LBP, |
| | FBLN1, SPAG17, PDLIM2, ARHGEF17, IGLC7, AGRN, AGT, RBP4, AHSG, Ig kappa |
| | chain V-III region GOL, SERPINA5, GSN, Ig kappa chain V-III region HAH, CFHR2, |
| | GIT2, INCENP |
| Vesicle Associated | MUC5B, FABP5, HPX, CP, SPRR2E, SPRR2D, PDE4D, GC, CPD, CD14, LAP3, |
| | AFM, FCN2, DMBT1, LIFR, SNX27, LCN1, ARFIP1, APOH, KLKB1, XP32, |
| | H2AFV, KRT75, KRT6C, KRT83, KRT76, KRT33B, KRT72, KRT31, KRT73, |
| | DSG1, LCE1C, LCE1A, CFB, CFH, SERPINA1, Ig kappa chain V-I region EU, Ig |
| | kappa chain V-II region MIL, Ig lambda chain V-IV region Bau, Ig heavy chain V- |
| | III region GAL, IGLC6, ACTG2 |

[0307] Examples of additional biomarkers that can be incorporated into the methods and compositions of the invention include without limitation those disclosed in International Patent Application Nos. PCT/US2012/042519 (WO 2012/174282), filed Jun. 14, 2012 and PCT/US2012/050030 (WO 2013/022995), filed Aug. 8, 2012.

[0308] In various embodiments of the invention, the biomarkers or biosignature used to detect or assess any of the conditions or diseases disclosed herein can comprise one or more biomarkers in one of several different categories of markers, wherein the categories include without limitation one or more of: 1) disease specific biomarkers; 2) cell- or tissue-specific biomarkers; 3) vesicle-specific markers (e.g., general vesicle biomarkers); 4. angiogenesis-specific biomarkers; and 5) immunomodulatory biomarkers. Examples of all such markers are disclosed herein and known to a person having ordinary skill in the art. Furthermore, a biomarker known in the art that is characterized to have a role in a particular disease or condition can be adapted for use as a target in compositions and methods of the invention. In further embodiments, such biomarkers that are associated with vesicles can be all vesicle surface markers, or a combination of vesicle surface markers and vesicle payload markers (i.e., molecules enclosed by a vesicle). The biomarkers assessed can be from a combination of sources. For example, a disease or disorder may be detected or characterized by assessing a combination of proteins, nucleic acids, vesicles, circulating biomarkers, biomarkers from a tissue sample, and the like. In addition, as noted herein, the biological sample assessed can be any biological fluid, or can comprise individual components present within such biological fluid (e.g., vesicles, nucleic acids, proteins, or complexes thereof).

[0309] EpCAM is a pan-epithelial differentiation antigen that is expressed on many tumor cells. It is intricately linked with the Cadherin-Catenin pathway and hence the fundamental WNT pathway responsible for intracellular signalling and polarity. It has been used as an immunotherapeutic target in the treatment of gastrointestinal, urological and other carcinomas. (Chaudry M A, Sales K, Ruf P, Lindhofer H, Winslet M C (April 2007). Br. J Cancer 96 (7): 1013-9.). It is expressed in undifferentiated pluripotent stem cells. EpCAM is a member of a family that includes at least two type I membrane proteins and functions as a homotypic calcium-independent cell adhesion molecule. Mutations in this gene result in congenital tufting enteropathy. EpCAM has been observed on the surface of microvesicles derived from cancer cell of various lineages. EpCAM is used as an exemplary surface antigen in various examples herein. One of skill will appreciate that various embodiments and examples using EpCAM can be applied to other microvesicle surface antigens as well.

### Therapeutics

[0310] As used herein “therapeutically effective amount” refers to an amount of a composition that relieves (to some extent, as judged by a skilled medical practitioner) one or more symptoms of the disease or condition in a mammal. Additionally, by “therapeutically effective amount” of a composition is meant an amount that returns to normal, either partially or completely, physiological or biochemical parameters associated with or causative of a disease or condition. A clinician skilled in the art can determine the therapeutically effective amount of a composition in order to treat or prevent a particular disease condition, or disorder when it is administered, such as intravenously, subcutaneously, intraperitoneally, orally, or through inhalation. The precise amount of the composition required to be therapeutically effective will depend upon numerous factors, e.g., such as the specific activity of the active agent, the delivery device employed, physical characteristics of the agent, purpose for the administration, in addition to many patient specific considerations. But a determination of a therapeutically effective amount is within the skill of an ordinarily skilled clinician upon the appreciation of the disclosure set forth herein.

[0311] The terms “treating,” “treatment,” “therapy,” and “therapeutic treatment” as used herein refer to curative therapy, prophylactic therapy, or preventative therapy. An example of “preventative therapy” is the prevention or lessening the chance of a targeted disease (e.g., cancer or other proliferative disease) or related condition thereto. Those in need of treatment include those already with the disease or condition as well as those prone to have the disease or condition to be prevented. The terms “treating,” “treatment,” “therapy,” and “therapeutic treatment” as used herein also describe the management and care of a mammal for the purpose of combating a disease, or related condition, and includes the administration of a composition to alleviate the symptoms, side effects, or other complications of the disease, condition. Therapeutic treatment for cancer includes, but is not limited to, surgery, chemotherapy, radiation therapy, gene therapy, and immunotherapy.

[0312] As used herein, the term “agent” or “drug” or “therapeutic agent” refers to a chemical compound, a mixture of chemical compounds, a biological macromolecule, or an extract made from biological materials such as bacteria, plants, fungi, or animal (particularly mammalian) cells or tissues that are suspected of having therapeutic properties. The agent or drug can be purified, substantially purified or partially purified. An “agent” according to the present invention, also includes a radiation therapy agent or a “chemotherapuetic agent.”

[0313] As used herein, the term “diagnostic agent” refers to any chemical used in the imaging of diseased tissue, such as, e.g., a tumor.

[0314] As used herein, the term “chemotherapuetic agent” refers to an agent with activity against cancer, neoplastic, and/or proliferative diseases, or that has ability to kill cancerous cells directly.

[0315] As used herein, “pharmaceutical formulations” include formulations for human and veterinary use with no significant adverse toxicological effect. “Pharmaceutically acceptable formulation” as used herein refers to a composition or formulation that allows for the effective distribution of the nucleic acid molecules of the instant invention in the physical location most suitable for their desired activity.

[0316] As used herein the term “pharmaceutically acceptable carrier” is intended to include any and all solvents, dispersion media, coatings, antibacterial and antifungal agents, isotonic and absorption delaying agents, and the like, compatible with pharmaceutical administration. The use of such media and agents for pharmaceutically active substances is well known in the art. Except insofar as any conventional media or agent is incompatible with the active compound, use thereof in the compositions is contemplated.

[0317] Aptamer-Toxin Conjugates as a Cancer Therapeutic

[0318] Extensive previous work has developed the concept of antibody-toxin conjugates (“immunoconjugates”) as potential therapies for a range of indications, mostly directed at the treatment of cancer with a primary focus on hematological tumors. A variety of different payloads for targeted delivery have been tested in pre-clinical and clinical studies, including protein toxins, high potency small molecule cytotoxics, radioisotopes, and liposome-encapsulated drugs. While these efforts have successfully yielded three FDA-approved therapies for hematological tumors, immunoconjugates as a class (especially for solid tumors) have historically yielded disappointing results that have been attributable to multiple different properties of antibodies, including tendencies to develop neutralizing antibody responses to non-humanized antibodies, limited penetration in solid tumors, loss of target binding affinity as a result of toxin conjugation, and imbalances between antibody half-life and toxin conjugate half-life that limit the overall therapeutic index (reviewed by Reff and Heard, Critical Reviews in Oncology/Hematology, 40 (2001):25-35).

[0319] Aptamers are functionally similar to antibodies, except their absorption, distribution, metabolism, and excretion (“ADME”) properties are intrinsically different and they generally lack many of the immune effector functions generally associated with antibodies (e.g., antibody-dependent cellular cytotoxicity, complement-dependent cytotoxicity). In comparing many of the properties of aptamers and antibodies previously described, several factors suggest that toxin-delivery via aptamers offers several concrete advantages over delivery with antibodies, ultimately affording them better potential as therapeutics. Several examples of the advantages of toxin-delivery via aptamers over antibodies are as follows:

[0320] 1) Aptamer-toxin conjugates are entirely chemically synthesized. Chemical synthesis provides more control over the nature of the conjugate. For example, the stoichiometry (ratio of toxins per aptamer) and site of attachment can be precisely defined. Different linker chemistries can be readily tested. The reversibility of aptamer folding means that loss of activity during conjugation is unlikely and provides more flexibility in adjusting conjugation conditions to maximize yields.

[0321] 2) Smaller size allows better tumor penetration. Poor penetration of antibodies into solid tumors is often cited as a factor limiting the efficacy of conjugate approaches. See Colcher, D., Goel, A., Pavlinkova, G., Beresford, G., Booth, B., Batra, S. K. (1999) “Effects of genetic engineering on the pharmacokinetics of antibodies,” Q. J. Nucl. Med., 43: 132-139. Studies comparing the properties of unPEGylated anti-tenascin C aptamers with corresponding antibodies demonstrate efficient uptake into tumors (as defined by the tumor:blood ratio) and evidence that aptamer localized to the tumor is unexpectedly long-lived (t_{1/2}>12 hours) (Hicke, B. J., Stephens, A. W., “Escort aptamers: a delivery service for diagnosis and therapy”, J. Clin. Invest., 106:923-928 (2000)).

[0322] 3) Tunable PK. Aptamer half-life/metabolism can be easily tuned to match properties of payload, optimizing the ability to deliver toxin to the tumor while minimizing systemic exposure. Appropriate modifications to the aptamer backbone and addition of high molecular weight PEGs should make it possible to match the half-life of the aptamer to the intrinsic half-life of the conjugated toxin/linker, minimizing systemic exposure to non-functional toxin-bearing metabolites (expected if t_{1/2}(aptamer)<<t_{1/2}(toxin)) and reducing the likelihood that persisting unconjugated aptamer will functionally block uptake of conjugated aptamer (expected if t_{1/2}(aptamer)>>t_{1/2}(toxin)).

[0323] 4) Relatively low material requirements. It is likely that dosing levels will be limited by toxicity intrinsic to the cytotoxic payload. As such, a single course of treatment will likely entail relatively small (<100 mg) quantities of aptamer, reducing the likelihood that the cost of oligonucleotide synthesis will be a barrier for aptamer-based therapies.

[0324] 5) Parenteral administration is preferred for this indication. There will be no special need to develop alternative formulations to drive patient/physician acceptance.

[0325] The invention provides a pharmaceutical composition comprising a therapeutically effective amount of an oligonucleotide probe aptamer, or plurality thereof, provided by the invention or a salt thereof, and a pharmaceutically acceptable carrier or diluent. The invention also provides a pharmaceutical composition comprising a therapeutically effective amount of the aptamer or a salt thereof, and a pharmaceutically acceptable carrier or diluent. Relatedly, the invention provides a method of treating or ameliorating a disease or disorder, comprising administering the pharmaceutical composition to a subject in need thereof. Administering a therapeutically effective amount of the composition to the subject may result in: (a) an enhancement of the delivery of the active agent to a disease site relative to delivery of the active agent alone; or (b) an enhancement of microvesicles clearance resulting in a decrease of at least 10%, 20%, 30%, 40%, 50%, 60%, 70%, 80%, or 90% in a blood level of microvesicles targeted by the aptamer; or (c) an decrease in biological activity of microvesicles targeted by the aptamer of at least 10%, 20%, 30%, 40%, 50%, 60%, 70%, 80%, or 90%. In an embodiment, the biological activity of microvesicles comprises immune suppression or transfer of genetic information. The disease or disorder can include without limitation those disclosed herein. For example, the disease or disorder may comprise a neoplastic, proliferative, or inflammatory, metabolic, cardiovascular, or neurological disease or disorder. See, e.g., section “Phenotypes.”

[0326] Modifications

[0327] Modifications to the one or more oligonucleotide of the invention, e.g., such as comprising a sequence comprising any of SEQ ID NOs. 4151-14156, or any combination thereof, can be made to alter desired characteristics, including without limitation in vivo stability, specificity, affinity, avidity or nuclease susceptibility. Alterations to the half life may improve stability in vivo or may reduce stability to limit in vivo toxicity. Such alterations can include mutations, truncations or extensions. The 5′ and/or 3′ ends of the multipartite oligonucleotide constructs can be protected or deprotected to modulate stability as well. Modifications to improve in vivo stability, specificity, affinity, avidity or nuclease susceptibility or alter the half life to influence in vivo toxicity may be at the 5′ or 3′ end and include but are not limited to the following: locked nucleic acid (LNA) incorporation, unlocked nucleic acid (UNA) incorporation, phosphorothioate backbone instead of phosphodiester backbone, amino modifiers (i.e. C6-dT), dye conjugates (Cy dues, Fluorophores, etc), Biotinylation, PEG linkers, Click chemistry linkers, dideoxynucleotide end blockers, inverted end bases, cholesterol TEG or other lipid based labels.

[0328] Linkage options for segments of the oligonucleotide of the invention can be on the 5′ or 3′ end of an oligonucleotide or to a primary amine, sulfhydryl or carboxyl group of an antibody and include but are not limited to the following: Biotin-target oligonucleotide/Ab, streptavidin-complement oligonucleotide or vice versa, amino modified-target Ab/oligonucleotide, thiol/carboxy-complement oligonucleotide or vice versa, Click chemistry-target Ab/oligonucleotide, corresponding Click chemistry partner-complement oligonucleotide or vice versa. The linkages may be covalent or non-covalent and may include but are not limited to monovalent, multivalent (i.e. bi, tri or tetra-valent) assembly, to a DNA scaffold (i.e. DNA origami structure), drug/chemotherapeutic agent, nanoparticle, microparticle or a micelle or liposome.

[0329] A linker region can comprise a spacer with homo- or multifunctional reactive groups that can vary in length and type. These include but are not limited to the following: spacer C18, PEG4, PEG6, PEG8, and PEG12.

[0330] The oligonucleotide of the invention can further comprise additional elements to add desired biological effects. For example, the oligonucleotide of the invention may comprise a membrane disruptive moiety. The oligonucleotide of the invention may also be conjugated to one or more chemical moiety that provides such effects. For example, the oligonucleotide of the invention may be conjugated to a detergent-like moiety to disrupt the membrane of a target cell or microvesicle. Useful ionic detergents include sodium dodecyl sulfate (SDS, sodium lauryl sulfate (SLS)), sodium laureth sulfate (SLS, sodium lauryl ether sulfate (SLES)), ammonium lauryl sulfate (ALS), cetrimonium bromide, cetrimonium chloride, cetrimonium stearate, and the like. Useful non-ionic (zwitterionic) detergents include polyoxyethylene glycols, polysorbate 20 (also known as Tween 20), other polysorbates (e.g., 40, 60, 65, 80, etc), Triton-X (e.g., X100, X114), 3-[(3-cholamidopropyl)dimethylammonio]-1-propanesulfonate (CHAPS), CHAPSO, deoxycholic acid, sodium deoxycholate, NP-40, glycosides, octyl-thio-glucosides, maltosides, and the like. One of skill will appreciate that functional fragments, such as membrane disruptive moieties, can be covalently or non-covalently attached to the oligonucleotide of the invention.

[0331] Oligonucleotide segments, including those of a multipartite construct, can include any desireable base modification known in the art. In certain embodiments, oligonucleotide segments are 10 to 50 nucleotides in length. One having ordinary skill in the art will appreciate that this embodies oligonucleotides of 10, 11, 12, 13, 14, 15, 16, 17, 18, 19, 20, 21, 22, 23, 24, 25, 26, 27, 28, 29, 30, 31, 32, 33, 34, 35, 36, 37, 38, 39, 40, 41, 42, 43, 44, 45, 46, 47, 48, 49, or 50 nucleotides in length, or any range derivable there within.

[0332] In certain embodiments, the invention provides a multipartite construct comprising a chimeric oligonucleotide that contains two or more chemically distinct regions, each made up of at least one nucleotide. Such chimeras can be referred to using terms such as multipartite, multivalent, or the like. The oligonucleotides portions may contain at least one region of modified nucleotides that confers one or more beneficial properties, e.g., increased nuclease resistance, bioavailability, increased binding affinity for the target. Chimeric nucleic acids of the invention may be formed as composite structures of two or more oligonucleotides, two or more types of oligonucleotides (e.g., both DNA and RNA segments), modified oligonucleotides, oligonucleosides and/or oligonucleotide mimetics. Such compounds have also been referred to in the art as hybrids. Representative United States patents that teach the preparation of such hybrid structures comprise, but are not limited to, U.S. Pat. Nos. 5,013,830; 5,149,797; 5,220,007; 5,256,775; 5,366,878; 5,403,711; 5,491,133; 5,565,350; 5,623,065; 5,652,355; 5,652,356; and 5,700,922, each of which is herein incorporated by reference in its entirety. Within these constructs, a sequence provided by the invention, e.g., such as comprising a sequence comprising any of SEQ ID NOs. 4151-14156, can be used to target the multipartite construct to a desired cell or tissue.

[0333] In certain embodiments, an oligonucleotide of the invention comprises at least one nucleotide modified at the 2′ position of the sugar, including without limitation a 2′-0-alkyl, 2′-0-alkyl-0-alkyl or 2′-fluoro-modified nucleotide. In other embodiments, RNA modifications include 2′-fluoro, 2′-amino and 2′ O-methyl modifications on the ribose of pyrimidines, a basic residue or an inverted base at the 3′ end of the RNA. Such modifications are routinely incorporated into oligonucleotides and these oligonucleotides have been shown to have higher target binding affinity in some cases than 2′-deoxyoligonucleotides against a given target.

[0334] A number of nucleotide and nucleoside modifications have been shown to make an oligonucleotide more resistant to nuclease digestion, thereby prolonging in vivo half-life. Specific examples of modified oligonucleotides include those comprising backbones comprising, for example, phosphorothioates, phosphotriesters, methyl phosphonates, short chain alkyl or cycloalkyl intersugar linkages or short chain heteroatomic or heterocyclic intersugar linkages. The constructs of the invention can comprise oligonucleotides with phosphorothioate backbones and/or heteroatom backbones, e.g., CH2-NH-0-CH2, CH, ˜N(CH3)˜0˜CH2 (known as a methylene(methylimino) or MMI backbone], CH2-O—N(CH3)-CH2, CH2-N(CH3)-N(CH3)-CH2 and O—N(CH3)-CH2-CH2 backbones, wherein the native phosphodiester backbone is represented as O—P—O—CH,); amide backbones (De Mesmaeker et al, 1995); morpholino backbone structures (Summerton and Weller, U.S. Pat. No. 5,034,506); peptide nucleic acid (PNA) backbone (wherein the phosphodiester backbone of the oligonucleotide is replaced with a polyamide backbone, the nucleotides being bound directly or indirectly to the aza nitrogen atoms of the polyamide backbone (Nielsen, et al., 1991), each of which is herein incorporated by reference in its entirety. Phosphorus-containing linkages include, but are not limited to, phosphorothioates, chiral phosphorothioates, phosphorodithioates, phosphotriesters, aminoalkylphosphotriesters, methyl and other alkyl phosphonates comprising 3′alkylene phosphonates and chiral phosphonates, phosphinates, phosphoramidates comprising 3′-amino phosphoramidate and aminoalkylphosphoramidates, thionophosphoramidates, thionoalkylphosphonates, thionoalkylphosphotriesters, and boranophosphates having normal 3′-5′ linkages, 2′-5′ linked analogs of these, and those having inverted polarity wherein the adjacent pairs of nucleoside units are linked 3*-5* to 5*-3* or 2*-5* to 5*-2*; see U.S. Pat. Nos. 3,687,808; 4,469,863; 4,476,301; 5,023,243; 5,177,196; 5,188,897; 5,264,423; 5,276,019; 5,278,302; 5,286,717; 5,321, 131; 5,399,676; 5,405,939; 5,453,496; 5,455, 233; 5,466,677; 5,476,925; 5,519,126; 5,536,821; 5,541,306; 5,550,111; 5,563, 253; 5,571,799; 5,587,361; and 5,625,050, each of which is herein incorporated by reference in its entirety. Morpholino-based oligomeric compounds are known in the art described in Braasch & Corey, Biochemistry vol. 41, no. 14, 2002, pages 4503-4510; Genesis vol. 30, 2001, page 3; Heasman, J. Dev. Biol. vol. 243, 2002, pages 209-214; Nasevicius et al. Nat. Genet. vol. 26, 2000, pages 216-220; Lacerra et al. Proc. Natl. Acad. Sci. vol. 97, 2000, pages 9591-9596 and U.S. Pat. No. 5,034,506, issued Jul. 23, 1991, each of which is herein incorporated by reference in its entirety. Cyclohexenyl nucleic acid oligonucleotide mimetics are described in Wang et al., J. Am. Chem. Soc. Vol. 122, 2000, pages 8595-8602, the contents of which is incorporated herein in its entirety. An oligonucleotide of the invention can comprise at least such modification as desired.

[0335] Modified oligonucleotide backbones that do not include a phosphorus atom therein have backbones that can be formed by short chain alkyl or cycloalkyl internucleoside linkages, mixed heteroatom and alkyl or cycloalkyl internucleoside linkages, or one or more short chain heteroatomic or heterocyclic internucleoside linkages. These comprise those having morpholino linkages (formed in part from the sugar portion of a nucleoside); siloxane backbones; sulfide, sulfoxide and sulfone backbones; formacetyl and thioformacetyl backbones; methylene formacetyl and thioformacetyl backbones; alkene containing backbones; sulfamate backbones; methyleneimino and methylenehydrazino backbones; sulfonate and sulfonamide backbones; amide backbones; and others having mixed N, O, S and CH2 component parts; see U.S. Pat. Nos. 5,034,506; 5,166,315; 5,185,444; 5,214,134; 5,216,141; 5,235,033; 5,264,562; 5,264,564; 5,405,938; 5,434,257; 5,466,677; 5,470,967; 5,489,677; 5,541,307; 5,561,225; 5,596,086; 5,602,240; 5,610,289; 5,602,240; 5,608,046; 5,610,289; 5,618,704; 5,623,070; 5,663,312; 5,633,360; 5,677,437; and 5,677,439, each of which is herein incorporated by reference in its entirety. An oligonucleotide of the invention can comprise at least such modification as desired.

[0336] In certain embodiments, an oligonucleotide of the invention comprises one or more substituted sugar moieties, e.g., one of the following at the 2′ position: OH, SH, SCH₃, F, OCN, OCH₃OCH₃, OCH₃O(CH₂)nCH₃, O(CH₂)nNH₂ or O(CH₂)nCH₃ where n is from 1 to about 10; Ci to CIO lower alkyl, alkoxyalkoxy, substituted lower alkyl, alkaryl or aralkyl; CI; Br; CN; CF₃; OCF₃; O-, S-, or N-alkyl; O-, S-, or N-alkenyl; SOCH₃; SO₂CH₃; ONO₂; NO₂; N₃; NH₂; heterocycloalkyl; heterocycloalkaryl; aminoalkylamino; polyalkylamino; substituted silyl; an RNA cleaving group; a reporter group; an intercalator; a group for improving the pharmacokinetic properties of an oligonucleotide; or a group for improving the pharmacokinetic/pharmacodynamic properties of an oligonucleotide and other substituents having similar properties. A preferred modification includes 2′-methoxyethoxy [2′-0-CH2CH2OCH3, also known as 2′-0-(2-methoxyethyl)]. Other preferred modifications include 2*-methoxy (2*-0-CH3), 2*-propoxy (2*-OCH2.CH2CH3) and 2*-fluoro (2*-F). Similar modifications may also be made at other positions on the oligonucleotide, e.g., the 3′ position of the sugar on the 3′ terminal nucleotide and the 5′ position of 5′ terminal nucleotide. Oligonucleotides may also have sugar mimetics such as cyclobutyls in place of the pentofuranosyl group.

[0337] In certain embodiments, an oligonucleotide of the invention comprises one or more base modifications and/or substitutions. As used herein, “unmodified” or “natural” bases include adenine (A), guanine (G), thymine (T), cytosine (C) and uracil (U). Modified bases include, without limitation, bases found only infrequently or transiently in natural nucleic acids, e.g., hypoxanthine, 6-methyladenine, 5-Me pyrimidines, particularly 5-methylcytosine (also referred to as 5-methyl-2′ deoxy cytosine and often referred to in the art as 5-Me-C), 5-hydroxymethylcytosine (HMC), glycosyl HMC and gentobiosyl HMC, as well as synthetic bases, e.g., 2-aminoadenine, 2-(methylamino)adenine, 2-(imidazolylalkyl)adenine, 2-(aminoalklyamino)adenine or other heterosubstituted alkyladenines, 2-thiouracil, 2-thiothymine, 5-bromouracil, 5-hydroxymethyluracil, 8-azaguanine, 7-deazaguanine, N6 (6-aminohexyl)adenine and 2,6-diaminopurine (Komberg, 1980; Gebeyehu, et ah, 1987). A “universal” base known in the art, e.g., inosine, can also be included. 5-Me-C substitutions can also be included. These have been shown to increase nucleic acid duplex stability by 0.6-1.20 C. See, e.g., Sanghvi et al., ‘Antisense Research & Applications’, 1993, CRC PRESS pages 276-278. Further suitable modified bases are described in U.S. Pat. No. 3,687,808, as well as U.S. Pat. Nos. 4,845,205; 5,130,302; 5,134,066; 5,175, 273; 5, 367,066; 5,432,272; 5,457,187; 5,459,255; 5,484,908; 5,502,177; 5,525,711; 5,552,540; 5,587,469; 5,596,091; 5,614,617; 5,750,692, and 5,681,941, each of which is herein incorporated by reference.

[0338] It is not necessary for all positions in a given oligonucleotide to be uniformly modified, and in fact more than one of the aforementioned modifications may be incorporated in a single oligonucleotide or even at within a single nucleoside within an oligonucleotide.

[0339] In certain embodiments, both a sugar and an internucleoside linkage, i.e., the backbone, of one or more nucleotide units within an oligonucleotide of the invention are replaced with novel groups. The base can be maintained for hybridization with an appropriate nucleic acid target compound. One such oligomeric compound, an oligonucleotide mimetic that has been shown to retain hybridization properties, is referred to as a peptide nucleic acid (PNA). In PNA compounds, the sugar-backbone of an oligonucleotide is replaced with an amide containing backbone, for example, an aminoethylglycine backbone. The nucleobases are retained and are bound directly or indirectly to aza nitrogen atoms of the amide portion of the backbone. Representative patents that teach the preparation of PNA compounds comprise, but are not limited to, U.S. Pat. Nos. 5,539,082; 5,714,331; and 5,719,262, each of which is herein incorporated by reference. Further teaching of PNA compounds can be found in Nielsen et al. Science vol. 254, 1991, page 1497, which is herein incorporated by reference.

[0340] In certain embodiments, the oligonucleotide of the invention is linked (covalently or non-covalently) to one or more moieties or conjugates that enhance activity, cellular distribution, or localization. Such moieties include, without limitation, lipid moieties such as a cholesterol moiety (Letsinger et al. Proc. Natl. Acad. Sci. Usa. vol. 86, 1989, pages 6553-6556), cholic acid (Manoharan et al. Bioorg. Med. Chem. Let. vol. 4, 1994, pages 1053-1060), a thioether, e.g., hexyl-S-tritylthiol (Manoharan et al. Ann. N. Y. Acad. Sci. Vol. 660, 1992, pages 306-309; Manoharan et al. Bioorg. Med. Chem. Let. vol. 3, 1993, pages 2765-2770), a thiocholesterol (Oberhauser et al. Nucl. Acids Res. vol. 20, 1992, pages 533-538), an aliphatic chain, e.g., dodecandiol or undecyl residues (Kabanov et al. Febs Lett. vol. 259, 1990, pages 327-330; Svinarchuk et al. Biochimie. vol. 75, 1993, pages 49-54), a phospholipid, e.g., di-hexadecyl-rac-glycerol or triethylammonium 1,2-di-O-hexadecyl-rac-glycero-3-H-phosphonate (Manoharan et al. Tetrahedron Lett. vol. 36, 1995, pages 3651-3654; Shea et al. Nucl. Acids Res. vol. 18, 1990, pages 3777-3783), a polyamine or a polyethylene glycol chain (Mancharan et al. Nucleosides & Nucleotides vol. 14, 1995, pages 969-973), or adamantane acetic acid (Manoharan et al. Tetrahedron Lett. vol. 36, 1995, pages 3651-3654), a palmityl moiety (Mishra et al. Biochim. Biophys. Acta vol. 1264, 1995, pages 229-237), or an octadecylamine or hexylamino-carbonyl-t oxycholesterol moiety (Crooke et al. J. Pharmacol. Exp. Ther. vol. 277, 1996, pages 923-937), each of which is herein incorporated by reference in its entirety. See also U.S. Pat. Nos. 4,828,979; 4,948,882; 5,218,105; 5,525,465; 5,541,313; 5,545,730; 5,552,538; 5,578,717; 5,580,731; 5,580,731; 5,591,584; 5,109,124; 5,118,802; 5,138,045; 5,414,077; 5,486,603; 5,512,439; 5,578,718; 5,608,046; 4,587,044; 4,605,735; 4,667,025; 4,762,779; 4,789,737; 4,824,941; 4,835,263; 4,876,335; 4,904,582; 4,958,013; 5,082,830; 5,112,963; 5,214,136; 5,082,830; 5,112,963; 5,214,136; 5,245,022; 5,254,469; 5,258,506; 5,262,536; 5,272,250; 5,292,873; 5,317,098; 5,371,241, 5,391,723; 5,416,203, 5,451,463; 5,510,475; 5,512,667; 5,514,785; 5,565,552; 5,567,810; 5,574,142; 5,585,481; 5,587,371; 5,595,726; 5,597,696; 5,599,923; 5,599,928 and 5,688,941, each of which is herein incorporated by reference in its entirety.

[0341] The oligonucleotide of the invention can be modified to incorporate a wide variety of modified nucleotides as desired. For example, the construct may be synthesized entirely of modified nucleotides or with a subset of modified nucleotides. The modifications can be the same or different. Some or all nucleotides may be modified, and those that are modified may contain the same modification. For example, all nucleotides containing the same base may have one type of modification, while nucleotides containing other bases may have different types of modification. All purine nucleotides may have one type of modification (or are unmodified), while all pyrimidine nucleotides have another, different type of modification (or are unmodified). Thus, the construct may comprise any combination of desired modifications, including for example, ribonucleotides (2′-OH), deoxyribonucleotides (2′-deoxy), 2′-amino nucleotides (2′-NH2), 2′-fluoro nucleotides (2′-F) and 2′-O-methyl (2′-OMe) nucleotides.

[0342] In some embodiments, the oligonucleotide of the invention is synthesized using a transcription mixture containing modified nucleotides in order to generate a modified construct. For example, a transcription mixture may contain only 2′-OMe A, G, C and U and/or T triphosphates (2′-OMe ATP, 2′-OMe UTP and/or 2*-OMe TTP, 2*-OMe CTP and 2*-OMe GTP), referred to as an MNA or mRmY mixture. Oligonucleotides generated therefrom are referred to as MNA oligonucleotides or mRmY oligonucleotides and contain only 2′-O-methyl nucleotides. A transcription mixture containing all 2′-OH nucleotides is referred to as an “rN” mixture, and oligonucleotides generated therefrom are referred to as “rN”, “rRrY” or RNA oligonucleotides. A transcription mixture containing all deoxy nucleotides is referred to as a “dN” mixture, and oligonucleotides generated therefrom are referred to as “dN”, “dRdY” or DNA oligonucleotides. Alternatively, a subset of nucleotides (e.g., C, U and/or T) may comprise a first modified nucleotides (e.g, 2′-OMe) nucleotides and the remainder (e.g., A and G) comprise a second modified nucleotide (e.g., 2′-OH or 2′-F). For example, a transcription mixture containing 2′-F U and 2′-OMe A, G and C is referred to as a “fUmV” mixture, and oligonucleotides generated therefrom are referred to as “fJmV” oligonucleotides. A transcription mixture containing 2′-F A and G, and 2′-OMe C and U and/or T is referred to as an “fRmY” mixture, and oligonucleotides generated therefrom are referred to as “fRmY” oligonucleotides. A transcription mixture containing 2′-F A and 2′-OMe C, G and U and/or T is referred to as “fAmB” mixture, and oligonucleotides generated therefrom are referred to as “fAmB” oligonucleotides.

[0343] One of skill in the art can improve pre-identified aptamer segments (e.g., variable regions or immunomodulatory regions that comprise an aptamer to a biomarker target or other entity) using various process modifications. Examples of such process modifications include, but are not limited to, truncation, deletion, substitution, or modification of a sugar or base or internucleotide linkage, capping, and PEGylation. In addition, the sequence requirements of an aptamer may be explored through doped reselections or aptamer medicinal chemistry. Doped reselections are carried out using a synthetic, degenerate pool that has been designed based on the aptamer of interest. The level of degeneracy usually varies from about 70-85% from the aptamer of interest. In general, sequences with neutral mutations are identified through the doped reselection process. Aptamer medicinal chemistry is an aptamer improvement technique in which sets of variant aptamers are chemically synthesized. These variants are then compared to each other and to the parent aptamer. Aptamer medicinal chemistry is used to explore the local, rather than global, introduction of substituents. For example, the following modifications may be introduced: modifications at a sugar, base, and/or internucleotide linkage, such as 2′-deoxy, 2′-ribo, or 2′-O-methyl purines or pyrimidines, phosphorothioate linkages may be introduced between nucleotides, a cap may be introduced at the 5′ or 3′ end of the aptamer (such as 3′ inverted dT cap) to block degradation by exonucleases, or a polyethylene glycol (PEG) element may be added to the aptamer to increase the half-life of the aptamer in the subject.

[0344] Additional compositions comprising an oligonucleotide of the invention and uses thereof are further described herein.

[0345] Pharmaceutical Compositions

[0346] In an aspect, the invention provides pharmaceutical compositions comprising one or more oligonucleotide of the invention, e.g., a sequence comprising a region according to any one of SEQ ID NOs 4151-14156 or a plurality thereof. The invention further provides methods of administering such compositions.

[0347] The term “condition,” as used herein means an interruption, cessation, or disorder of a bodily function, system, or organ. Representative conditions include, but are not limited to, diseases such as cancer, inflammation, diabetes, and organ failure.

[0348] The phrase “treating,” “treatment of,” and the like include the amelioration or cessation of a specified condition.

[0349] The phrase “preventing,” “prevention of,” and the like include the avoidance of the onset of a condition.

[0350] The term “salt,” as used herein, means two compounds that are not covalently bound but are chemically bound by ionic interactions.

[0351] The term “pharmaceutically acceptable,” as used herein, when referring to a component of a pharmaceutical composition means that the component, when administered to an animal, does not have undue adverse effects such as excessive toxicity, irritation, or allergic response commensurate with a reasonable benefit/risk ratio. Accordingly, the term “pharmaceutically acceptable organic solvent,” as used herein, means an organic solvent that when administered to an animal does not have undue adverse effects such as excessive toxicity, irritation, or allergic response commensurate with a reasonable benefit/risk ratio. Preferably, the pharmaceutically acceptable organic solvent is a solvent that is generally recognized as safe (“GRAS”) by the United States Food and Drug Administration (“FDA”). Similarly, the term “pharmaceutically acceptable organic base,” as used herein, means an organic base that when administered to an animal does not have undue adverse effects such as excessive toxicity, irritation, or allergic response commensurate with a reasonable benefit/risk ratio.

[0352] The phrase “injectable” or “injectable composition,” as used herein, means a composition that can be drawn into a syringe and injected subcutaneously, intraperitoneally, or intramuscularly into an animal without causing adverse effects due to the presence of solid material in the composition. Solid materials include, but are not limited to, crystals, gummy masses, and gels. Typically, a formulation or composition is considered to be injectable when no more than about 15%, preferably no more than about 10%, more preferably no more than about 5%, even more preferably no more than about 2%, and most preferably no more than about 1% of the formulation is retained on a 0.22 μm filter when the formulation is filtered through the filter at 98° F. There are, however, some compositions of the invention, which are gels, that can be easily dispensed from a syringe but will be retained on a 0.22 μm filter. In one embodiment, the term “injectable,” as used herein, includes these gel compositions. In one embodiment, the term “injectable,” as used herein, further includes compositions that when warmed to a temperature of up to about 40° C. and then filtered through a 0.22 μm filter, no more than about 15%, preferably no more than about 10%, more preferably no more than about 5%, even more preferably no more than about 2%, and most preferably no more than about 1% of the formulation is retained on the filter. In one embodiment, an example of an injectable pharmaceutical composition is a solution of a pharmaceutically active compound (for example, one or more oligonucleotide of the invention, e.g., a sequence comprising a region according to any one of SEQ ID NOs 4151-14156 or a plurality thereof) in a pharmaceutically acceptable solvent. One of skill will appreciate that injectable solutions have inherent properties, e.g., sterility, pharmaceutically acceptable excipients and free of harmful measures of pyrogens or similar contaminants.

[0353] The term “solution,” as used herein, means a uniformly dispersed mixture at the molecular or ionic level of one or more substances (solute), in one or more other substances (solvent), typically a liquid.

[0354] The term “suspension,” as used herein, means solid particles that are evenly dispersed in a solvent, which can be aqueous or non-aqueous.

[0355] The term “animal,” as used herein, includes, but is not limited to, humans, canines, felines, equines, bovines, ovines, porcines, amphibians, reptiles, and avians. Representative animals include, but are not limited to a cow, a horse, a sheep, a pig, an ungulate, a chimpanzee, a monkey, a baboon, a chicken, a turkey, a mouse, a rabbit, a rat, a guinea pig, a dog, a cat, and a human. In one embodiment, the animal is a mammal. In one embodiment, the animal is a human. In one embodiment, the animal is a non-human. In one embodiment, the animal is a canine, a feline, an equine, a bovine, an ovine, or a porcine.

[0356] The phrase “drug depot,” as used herein means a precipitate, which includes one or more oligonucleotide of the invention, e.g., a sequence comprising a region according to any one of SEQ ID NOs 4151-14156 or a plurality thereof, formed within the body of a treated animal that releases the oligonucleotide over time to provide a pharmaceutically effective amount of the oligonucleotide.

[0357] The phrase “substantially free of,” as used herein, means less than about 2 percent by weight. For example, the phrase “a pharmaceutical composition substantially free of water” means that the amount of water in the pharmaceutical composition is less than about 2 percent by weight of the pharmaceutical composition.

[0358] The term “effective amount,” as used herein, means an amount sufficient to treat or prevent a condition in an animal.

[0359] The nucleotides that make up the oligonucleotide of the invention can be modified to, for example, improve their stability, i.e., improve their in vivo half-life, and/or to reduce their rate of excretion when administered to an animal. The term “modified” encompasses nucleotides with a covalently modified base and/or sugar. For example, modified nucleotides include nucleotides having sugars which are covalently attached to low molecular weight organic groups other than a hydroxyl group at the 3′ position and other than a phosphate group at the 5′ position. Modified nucleotides may also include 2′ substituted sugars such as 2′-O-methyl-; 2′-O-alkyl; 2′-O-allyl; 2′-S-alkyl; 2′-S-allyl; 2′-fluoro-; 2′-halo or 2′-azido-ribose; carbocyclic sugar analogues; a-anomeric sugars; and epimeric sugars such as arabinose, xyloses or lyxoses, pyranose sugars, furanose sugars, and sedoheptulose.

[0360] Modified nucleotides are known in the art and include, but are not limited to, alkylated purines and/or pyrimidines; acylated purines and/or pyrimidines; or other heterocycles. These classes of pyrimidines and purines are known in the art and include, pseudoisocytosine; N4,N4-ethanocytosine; 8-hydroxy-N6-methyladenine; 4-acetylcytosine, 5-(carboxyhydroxylmethyl) uracil; 5-fluorouracil; 5-bromouracil; 5-carboxymethylaminomethyl-2-thiouracil; 5-carboxymethylaminomethyl uracil; dihydrouracil; inosine; N6-isopentyl-adenine; 1-methyladenine; 1-methylpseudouracil; 1-methylguanine; 2,2-dimethylguanine; 2-methyladenine; 2-methylguanine; 3-methylcytosine; 5-methylcytosine; N6-methyladenine; 7-methylguanine; 5-methylaminomethyl uracil; 5-methoxy amino methyl-2-thiouracil; 3-D-mannosylqueosine; 5-methoxycarbonylmethyluracil; 5-methoxyuracil; 2 methylthio-N6-isopentenyladenine; uracil-5-oxyacetic acid methyl ester; psueouracil; 2-thiocytosine; 5-methyl-2 thiouracil, 2-thiouracil; 4-thiouracil; 5-methyluracil; N-uracil-5-oxyacetic acid methylester; uracil 5-oxyacetic acid; queosine; 2-thiocytosine; 5-propyluracil; 5-propylcytosine; 5-ethyluracil; 5-ethylcytosine; 5-butyluracil; 5-pentyluracil; 5-pentylcytosine; and 2,6,-diaminopurine; methylpsuedouracil; 1-methylguanine; and 1-methylcytosine.

[0361] An oligonucleotide of the invention can also be modified by replacing one or more phosphodiester linkages with alternative linking groups. Alternative linking groups include, but are not limited to embodiments wherein P(O)O is replaced by P(O)S, P(S)S, P(O)NR2, P(O)R, P(O)OR′, CO, or CH2, wherein each R or R′ is independently H or a substituted or unsubstituted C1-C20 alkyl. A preferred set of R substitutions for the P(O)NR2 group are hydrogen and methoxyethyl. Linking groups are typically attached to each adjacent nucleotide through an —O— bond, but may be modified to include —N— or —S— bonds. Not all linkages in an oligomer need to be identical.

[0362] The oligonucleotide of the invention can also be modified by conjugation to a polymer, for example, to reduce the rate of excretion when administered to an animal. For example, the oligonucleotide can be “PEGylated,” i.e., conjugated to polyethylene glycol (“PEG”). In one embodiment, the PEG has an average molecular weight ranging from about 20 kD to 80 kD. Methods to conjugate an oligonucleotide with a polymer, such PEG, are known to those skilled in the art (See, e.g., Greg T. Hermanson, Bioconjugate Techniques, Academic Press, 1966).

[0363] The oligonucleotide of the invention, e.g., a sequence comprising a region according to any one of SEQ ID NOs 4151-14156 or a plurality thereof, can be used in the pharmaceutical compositions disclosed herein or known in the art.

[0364] In one embodiment, the pharmaceutical composition further comprises a solvent.

[0365] In one embodiment, the solvent comprises water.

[0366] In one embodiment, the solvent comprises a pharmaceutically acceptable organic solvent. Any useful and pharmaceutically acceptable organic solvents can be used in the compositions of the invention.

[0367] In one embodiment, the pharmaceutical composition is a solution of the salt in the pharmaceutically acceptable organic solvent.

[0368] In one embodiment, the pharmaceutical composition comprises a pharmaceutically acceptable organic solvent and further comprises a phospholipid, a sphingomyelin, or phosphatidyl choline. Without wishing to be bound by theory, it is believed that the phospholipid, sphingomyelin, or phosphatidyl choline facilitates formation of a precipitate when the pharmaceutical composition is injected into water and can also facilitate controlled release of the oligonucleotide from the resulting precipitate. Typically, the phospholipid, sphingomyelin, or phosphatidyl choline is present in an amount ranging from greater than 0 to 10 percent by weight of the pharmaceutical composition. In one embodiment, the phospholipid, sphingomyelin, or phosphatidyl choline is present in an amount ranging from about 0.1 to 10 percent by weight of the pharmaceutical composition. In one embodiment, the phospholipid, sphingomyelin, or phosphatidyl choline is present in an amount ranging from about 1 to 7.5 percent by weight of the pharmaceutical composition. In one embodiment, the phospholipid, sphingomyelin, or phosphatidyl choline is present in an amount ranging from about 1.5 to 5 percent by weight of the pharmaceutical composition. In one embodiment, the phospholipid, sphingomyelin, or phosphatidyl choline is present in an amount ranging from about 2 to 4 percent by weight of the pharmaceutical composition.

[0369] The pharmaceutical compositions can optionally comprise one or more additional excipients or additives to provide a dosage form suitable for administration to an animal. When administered to an animal, the oligonucleotide containing pharmaceutical compositions are typically administered as a component of a composition that comprises a pharmaceutically acceptable carrier or excipient so as to provide the form for proper administration to the animal. Suitable pharmaceutical excipients are described in Remington's Pharmaceutical Sciences 1447-1676 (Alfonso R. Gennaro ed., 19th ed. 1995), incorporated herein by reference. The pharmaceutical compositions can take the form of solutions, suspensions, emulsion, tablets, pills, pellets, capsules, capsules containing liquids, powders, suppositories, emulsions, aerosols, sprays, suspensions, or any other form suitable for use.

[0370] In one embodiment, the pharmaceutical compositions are formulated for intravenous or parenteral administration. Typically, compositions for intravenous or parenteral administration comprise a suitable sterile solvent, which may be an isotonic aqueous buffer or pharmaceutically acceptable organic solvent. Where necessary, the compositions can also include a solubilizing agent. Compositions for intravenous administration can optionally include a local anesthetic such as lidocaine to lessen pain at the site of the injection. Generally, the ingredients are supplied either separately or mixed together in unit dosage form, for example, as a dry lyophilized powder or water free concentrate in a hermetically sealed container such as an ampoule or sachette indicating the quantity of active agent. Where oligonucleotide-containing pharmaceutical compositions are to be administered by infusion, they can be dispensed, for example, with an infusion bottle containing, for example, sterile pharmaceutical grade water or saline. Where the pharmaceutical compositions are administered by injection, an ampoule of sterile water for injection, saline, or other solvent such as a pharmaceutically acceptable organic solvent can be provided so that the ingredients can be mixed prior to administration.

[0371] In another embodiment, the pharmaceutical compositions are formulated in accordance with routine procedures as a composition adapted for oral administration. Compositions for oral delivery can be in the form of tablets, lozenges, aqueous or oily suspensions, granules, powders, emulsions, capsules, syrups, or elixirs, for example. Oral compositions can include standard excipients such as mannitol, lactose, starch, magnesium stearate, sodium saccharin, cellulose, and magnesium carbonate. Typically, the excipients are of pharmaceutical grade. Orally administered compositions can also contain one or more agents, for example, sweetening agents such as fructose, aspartame or saccharin; flavoring agents such as peppermint, oil of wintergreen, or cherry; coloring agents; and preserving agents, to provide a pharmaceutically palatable preparation. Moreover, when in tablet or pill form, the compositions can be coated to delay disintegration and absorption in the gastrointestinal tract thereby providing a sustained action over an extended period of time. Selectively permeable membranes surrounding an osmotically active driving compound are also suitable for orally administered compositions. A time-delay material such as glycerol monostearate or glycerol stearate can also be used.

[0372] The pharmaceutical compositions further comprising a solvent can optionally comprise a suitable amount of a pharmaceutically acceptable preservative, if desired, so as to provide additional protection against microbial growth. Examples of preservatives useful in the pharmaceutical compositions of the invention include, but are not limited to, potassium sorbate, methylparaben, propylparaben, benzoic acid and its salts, other esters of parahydroxybenzoic acid such as butylparaben, alcohols such as ethyl or benzyl alcohol, phenolic compounds such as phenol, or quaternary compounds such as benzalkonium chlorides (e.g., benzethonium chloride).

[0373] In one embodiment, the pharmaceutical compositions of the invention optionally contain a suitable amount of a pharmaceutically acceptable polymer. The polymer can increase the viscosity of the pharmaceutical composition. Suitable polymers for use in the compositions and methods of the invention include, but are not limited to, hydroxypropylcellulose, hydoxypropylmethylcellulose (HPMC), chitosan, polyacrylic acid, and polymethacrylic acid.

[0374] Typically, the polymer is present in an amount ranging from greater than 0 to 10 percent by weight of the pharmaceutical composition. In one embodiment, the polymer is present in an amount ranging from about 0.1 to 10 percent by weight of the pharmaceutical composition. In one embodiment, the polymer is present in an amount ranging from about 1 to 7.5 percent by weight of the pharmaceutical composition. In one embodiment, the polymer is present in an amount ranging from about 1.5 to 5 percent by weight of the pharmaceutical composition. In one embodiment, the polymer is present in an amount ranging from about 2 to 4 percent by weight of the pharmaceutical composition. In one embodiment, the pharmaceutical compositions of the invention are substantially free of polymers.

[0375] In one embodiment, any additional components added to the pharmaceutical compositions of the invention are designated as GRAS by the FDA for use or consumption by animals. In one embodiment, any additional components added to the pharmaceutical compositions of the invention are designated as GRAS by the FDA for use or consumption by humans.

[0376] The components of the pharmaceutical composition (the solvents and any other optional components) are preferably biocompatible and non-toxic and, over time, are simply absorbed and/or metabolized by the body.

[0377] As described above, the pharmaceutical compositions of the invention can further comprise a solvent.

[0378] In one embodiment, the solvent comprises water.

[0379] In one embodiment, the solvent comprises a pharmaceutically acceptable organic solvent.

[0380] In an embodiment, the oligonucleotide of the invention, e.g., a sequence comprising a region according to any one of SEQ ID NOs 4151-14156 or a plurality thereof, are available as the salt of a metal cation, for example, as the potassium or sodium salt. These salts, however, may have low solubility in aqueous solvents and/or organic solvents, typically, less than about 25 mg/mL. The pharmaceutical compositions of the invention comprising (i) an amino acid ester or amino acid amide and (ii) a protonated oligonucleotide, however, may be significantly more soluble in aqueous solvents and/or organic solvents. Without wishing to be bound by theory, it is believed that the amino acid ester or amino acid amide and the protonated oligonucleotide form a salt, such as illustrated above, and the salt is soluble in aqueous and/or organic solvents.

[0381] Similarly, without wishing to be bound by theory, it is believed that the pharmaceutical compositions comprising (i) an oligonucleotide of the invention; (ii) a divalent metal cation; and (iii) optionally a carboxylate, a phospholipid, a phosphatidyl choline, or a sphingomyelin form a salt, such as illustrated above, and the salt is soluble in aqueous and/or organic solvents.

[0382] In one embodiment, the concentration of the oligonucleotide of the invention in the solvent is greater than about 2 percent by weight of the pharmaceutical composition. In one embodiment, the concentration of the oligonucleotide of the invention in the solvent is greater than about 5 percent by weight of the pharmaceutical composition. In one embodiment, the concentration of the oligonucleotide in the solvent is greater than about 7.5 percent by weight of the pharmaceutical composition. In one embodiment, the concentration of the oligonucleotide in the solvent is greater than about 10 percent by weight of the pharmaceutical composition. In one embodiment, the concentration of the oligonucleotide in the solvent is greater than about 12 percent by weight of the pharmaceutical composition. In one embodiment, the concentration of the oligonucleotide in the solvent is greater than about 15 percent by weight of the pharmaceutical composition. In one embodiment, the concentration of the oligonucleotide in the solvent is ranges from about 2 percent to 5 percent by weight of the pharmaceutical composition. In one embodiment, the concentration of the oligonucleotide in the solvent is ranges from about 2 percent to 7.5 percent by weight of the pharmaceutical composition. In one embodiment, the concentration of the oligonucleotide in the solvent ranges from about 2 percent to 10 percent by weight of the pharmaceutical composition. In one embodiment, the concentration of the oligonucleotide in the solvent is ranges from about 2 percent to 12 percent by weight of the pharmaceutical composition. In one embodiment, the concentration of the oligonucleotide in the solvent is ranges from about 2 percent to 15 percent by weight of the pharmaceutical composition. In one embodiment, the concentration of the oligonucleotide in the solvent is ranges from about 2 percent to 20 percent by weight of the pharmaceutical composition.

[0383] Any pharmaceutically acceptable organic solvent can be used in the pharmaceutical compositions of the invention. Representative, pharmaceutically acceptable organic solvents include, but are not limited to, pyrrolidone, N-methyl-2-pyrrolidone, polyethylene glycol, propylene glycol (i.e., 1,3-propylene glycol), glycerol formal, isosorbid dimethyl ether, ethanol, dimethyl sulfoxide, tetraglycol, tetrahydrofurfuryl alcohol, triacetin, propylene carbonate, dimethyl acetamide, dimethyl formamide, dimethyl sulfoxide, and combinations thereof.

[0384] In one embodiment, the pharmaceutically acceptable organic solvent is a water soluble solvent. A representative pharmaceutically acceptable water soluble organic solvent is triacetin.

[0385] In one embodiment, the pharmaceutically acceptable organic solvent is a water miscible solvent. Representative pharmaceutically acceptable water miscible organic solvents include, but are not limited to, glycerol formal, polyethylene glycol, and propylene glycol.

[0386] In one embodiment, the pharmaceutically acceptable organic solvent comprises pyrrolidone. In one embodiment, the pharmaceutically acceptable organic solvent is pyrrolidone substantially free of another organic solvent.

[0387] In one embodiment, the pharmaceutically acceptable organic solvent comprises N-methyl-2-pyrrolidone. In one embodiment, the pharmaceutically acceptable organic solvent is N-methyl-2-pyrrolidone substantially free of another organic solvent.

[0388] In one embodiment, the pharmaceutically acceptable organic solvent comprises polyethylene glycol. In one embodiment, the pharmaceutically acceptable organic solvent is polyethylene glycol substantially free of another organic solvent.

[0389] In one embodiment, the pharmaceutically acceptable organic solvent comprises propylene glycol. In one embodiment, the pharmaceutically acceptable organic solvent is propylene glycol substantially free of another organic solvent.

[0390] In one embodiment, the pharmaceutically acceptable organic solvent comprises glycerol formal. In one embodiment, the pharmaceutically acceptable organic solvent is glycerol formal substantially free of another organic solvent.

[0391] In one embodiment, the pharmaceutically acceptable organic solvent comprises isosorbid dimethyl ether. In one embodiment, the pharmaceutically acceptable organic solvent is isosorbid dimethyl ether substantially free of another organic solvent.

[0392] In one embodiment, the pharmaceutically acceptable organic solvent comprises ethanol. In one embodiment, the pharmaceutically acceptable organic solvent is ethanol substantially free of another organic solvent.

[0393] In one embodiment, the pharmaceutically acceptable organic solvent comprises dimethyl sulfoxide. In one embodiment, the pharmaceutically acceptable organic solvent is dimethyl sulfoxide substantially free of another organic solvent.

[0394] In one embodiment, the pharmaceutically acceptable organic solvent comprises tetraglycol. In one embodiment, the pharmaceutically acceptable organic solvent is tetraglycol substantially free of another organic solvent.

[0395] In one embodiment, the pharmaceutically acceptable organic solvent comprises tetrahydrofurfuryl alcohol. In one embodiment, the pharmaceutically acceptable organic solvent is tetrahydrofurfuryl alcohol substantially free of another organic solvent.

[0396] In one embodiment, the pharmaceutically acceptable organic solvent comprises triacetin. In one embodiment, the pharmaceutically acceptable organic solvent is triacetin substantially free of another organic solvent.

[0397] In one embodiment, the pharmaceutically acceptable organic solvent comprises propylene carbonate. In one embodiment, the pharmaceutically acceptable organic solvent is propylene carbonate substantially free of another organic solvent.

[0398] In one embodiment, the pharmaceutically acceptable organic solvent comprises dimethyl acetamide. In one embodiment, the pharmaceutically acceptable organic solvent is dimethyl acetamide substantially free of another organic solvent.

[0399] In one embodiment, the pharmaceutically acceptable organic solvent comprises dimethyl formamide. In one embodiment, the pharmaceutically acceptable organic solvent is dimethyl formamide substantially free of another organic solvent.

[0400] In one embodiment, the pharmaceutically acceptable organic solvent comprises at least two pharmaceutically acceptable organic solvents.

[0401] In one embodiment, the pharmaceutically acceptable organic solvent comprises N-methyl-2-pyrrolidone and glycerol formal. In one embodiment, the pharmaceutically acceptable organic solvent is N-methyl-2-pyrrolidone and glycerol formal. In one embodiment, the ratio of N-methyl-2-pyrrolidone to glycerol formal ranges from about 90:10 to 10:90.

[0402] In one embodiment, the pharmaceutically acceptable organic solvent comprises propylene glycol and glycerol formal. In one embodiment, the pharmaceutically acceptable organic solvent is propylene glycol and glycerol formal. In one embodiment, the ratio of propylene glycol to glycerol formal ranges from about 90:10 to 10:90.

[0403] In one embodiment, the pharmaceutically acceptable organic solvent is a solvent that is recognized as GRAS by the FDA for administration or consumption by animals. In one embodiment, the pharmaceutically acceptable organic solvent is a solvent that is recognized as GRAS by the FDA for administration or consumption by humans.

[0404] In one embodiment, the pharmaceutically acceptable organic solvent is substantially free of water. In one embodiment, the pharmaceutically acceptable organic solvent contains less than about 1 percent by weight of water. In one embodiment, the pharmaceutically acceptable organic solvent contains less about 0.5 percent by weight of water. In one embodiment, the pharmaceutically acceptable organic solvent contains less about 0.2 percent by weight of water. Pharmaceutically acceptable organic solvents that are substantially free of water are advantageous since they are not conducive to bacterial growth. Accordingly, it is typically not necessary to include a preservative in pharmaceutical compositions that are substantially free of water. Another advantage of pharmaceutical compositions that use a pharmaceutically acceptable organic solvent, preferably substantially free of water, as the solvent is that hydrolysis of the oligonucleotide is minimized. Typically, the more water present in the solvent the more readily the oligonucleotide can be hydrolyzed. Accordingly, oligonucleotide containing pharmaceutical compositions that use a pharmaceutically acceptable organic solvent as the solvent can be more stable than oligonucleotide containing pharmaceutical compositions that use water as the solvent.

[0405] In one embodiment, comprising a pharmaceutically acceptable organic solvent, the pharmaceutical composition is injectable.

[0406] In one embodiment, the injectable pharmaceutical compositions are of sufficiently low viscosity that they can be easily drawn into a 20 gauge and needle and then easily expelled from the 20 gauge needle. Typically, the viscosity of the injectable pharmaceutical compositions are less than about 1,200 cps. In one embodiment, the viscosity of the injectable pharmaceutical compositions are less than about 1,000 cps. In one embodiment, the viscosity of the injectable pharmaceutical compositions are less than about 800 cps. In one embodiment, the viscosity of the injectable pharmaceutical compositions are less than about 500 cps. Injectable pharmaceutical compositions having a viscosity greater than about 1,200 cps and even greater than about 2,000 cps (for example gels) are also within the scope of the invention provided that the compositions can be expelled through an 18 to 24 gauge needle.

[0407] In one embodiment, comprising a pharmaceutically acceptable organic solvent, the pharmaceutical composition is injectable and does not form a precipitate when injected into water.

[0408] In one embodiment, comprising a pharmaceutically acceptable organic solvent, the pharmaceutical composition is injectable and forms a precipitate when injected into water. Without wishing to be bound by theory, it is believed, for pharmaceutical compositions that comprise a protonated oligonucleotide and an amino acid ester or amide, that the a-amino group of the amino acid ester or amino acid amide is protonated by the oligonucleotide to form a salt, such as illustrated above, which is soluble in the pharmaceutically acceptable organic solvent but insoluble in water. Similarly, when the pharmaceutical composition comprises (i) an oligonucleotide; (ii) a divalent metal cation; and (iii) optionally a carboxylate, a phospholipid, a phosphatidyl choline, or a sphingomyelin, it is believed that the components of the composition form a salt, such as illustrated above, which is soluble in the pharmaceutically acceptable organic solvent but insoluble in water. Accordingly, when the pharmaceutical compositions are injected into an animal, at least a portion of the pharmaceutical composition precipitates at the injection site to provide a drug depot. Without wishing to be bound by theory, it is believed that when the pharmaceutically compositions are injected into an animal, the pharmaceutically acceptable organic solvent diffuses away from the injection site and aqueous bodily fluids diffuse towards the injection site, resulting in an increase in concentration of water at the injection site, that causes at least a portion of the composition to precipitate and form a drug depot. The precipitate can take the form of a solid, a crystal, a gummy mass, or a gel. The precipitate, however, provides a depot of the oligonucleotide at the injection site that releases the oligonucleotide over time. The components of the pharmaceutical composition, i.e., the amino acid ester or amino acid amide, the pharmaceutically acceptable organic solvent, and any other components are biocompatible and non-toxic and, over time, are simply absorbed and/or metabolized by the body.

[0409] In one embodiment, comprising a pharmaceutically acceptable organic solvent, the pharmaceutical composition is injectable and forms liposomal or micellar structures when injected into water (typically about 500 μL are injected into about 4 mL of water). The formation of liposomal or micellar structures are most often formed when the pharmaceutical composition includes a phospholipid. Without wishing to be bound by theory, it is believed that the oligonucleotide in the form of a salt, which can be a salt formed with an amino acid ester or amide or can be a salt with a divalent metal cation and optionally a carboxylate, a phospholipid, a phosphatidyl choline, or a sphingomyelin, that is trapped within the liposomal or micellar structure. Without wishing to be bound by theory, it is believed that when these pharmaceutically compositions are injected into an animal, the liposomal or micellar structures release the oligonucleotide over time.

[0410] In one embodiment, the pharmaceutical composition further comprising a pharmaceutically acceptable organic solvent is a suspension of solid particles in the pharmaceutically acceptable organic solvent. Without wishing to be bound by theory, it is believed that the solid particles comprise a salt formed between the amino acid ester or amino acid amide and the protonated oligonucleotide wherein the acidic phosphate groups of the oligonucleotide protonates the amino group of the amino acid ester or amino acid amide, such as illustrated above, or comprises a salt formed between the oligonucleotide; divalent metal cation; and optional carboxylate, phospholipid, phosphatidyl choline, or sphingomyelin, as illustrated above. Pharmaceutical compositions that are suspensions can also form drug depots when injected into an animal.

[0411] By varying the lipophilicity and/or molecular weight of the amino acid ester or amino acid amide it is possible to vary the properties of pharmaceutical compositions that include these components and further comprise an organic solvent. The lipophilicity and/or molecular weight of the amino acid ester or amino acid amide can be varied by varying the amino acid and/or the alcohol (or amine) used to form the amino acid ester (or amino acid amide). For example, the lipophilicity and/or molecular weight of the amino acid ester can be varied by varying the R hydrocarbon group of the amino acid ester. Typically, increasing the molecular weight of R1 increase the lipophilicity of the amino acid ester. Similarly, the lipophilicity and/or molecular weight of the amino acid amide can be varied by varying the R3 or R4 groups of the amino acid amide.

[0412] For example, by varying the lipophilicity and/or molecular weight of the amino acid ester or amino acid amide it is possible to vary the solubility of the oligonucleotide of the invention in water, to vary the solubility of the oligonucleotide in the organic solvent, vary the viscosity of the pharmaceutical composition comprising a solvent, and vary the ease at which the pharmaceutical composition can be drawn into a 20 gauge needle and then expelled from the 20 gauge needle.

[0413] Furthermore, by varying the lipophilicity and/or molecular weight of the amino acid ester or amino acid amide (i.e., by varying RI of the amino acid ester or R3 and R4 of the amino acid amide) it is possible to control whether the pharmaceutical composition that further comprises an organic solvent will form a precipitate when injected into water. Although different oligonucleotides exhibit different solubility and behavior, generally the higher the molecular weight of the amino acid ester or amino acid amide, the more likely it is that the salt of the protonated oligonucleotide and the amino acid ester of the amide will form a precipitate when injected into water. Typically, when RI of the amino acid ester is a hydrocarbon of about C16 or higher the pharmaceutical composition will form a precipitate when injected into water and when RI of the amino acid ester is a hydrocarbon of about C12 or less the pharmaceutical composition will not form a precipitate when injected into water. Indeed, with amino acid esters wherein R1 is a hydrocarbon of about C12 or less, the salt of the protonated oligonucleotide and the amino acid ester is, in many cases, soluble in water. Similarly, with amino acid amides, if the combined number of carbons in R3 and R4 is 16 or more the pharmaceutical composition will typically form a precipitate when injected into water and if the combined number of carbons in R3 and R4 is 12 or less the pharmaceutical composition will not form a precipitate when injected into water. Whether or not a pharmaceutical composition that further comprises a pharmaceutically acceptable organic solvent will form a precipitate when injected into water can readily be determined by injecting about 0.05 mL of the pharmaceutical composition into about 4 mL of water at about 98° F. and determining how much material is retained on a 0.22 μm filter after the composition is mixed with water and filtered. Typically, a formulation or composition is considered to be injectable when no more than 10% of the formulation is retained on the filter. In one embodiment, no more than 5% of the formulation is retained on the filter. In one embodiment, no more than 2% of the formulation is retained on the filter. In one embodiment, no more than 1% of the formulation is retained on the filter.

[0414] Similarly, in pharmaceutical compositions that comprise a protonated oligonucleotide and a diester or diamide of aspartic or glutamic acid, it is possible to vary the properties of pharmaceutical compositions by varying the amount and/or lipophilicity and/or molecular weight of the diester or diamide of aspartic or glutamic acid. Similarly, in pharmaceutical compositions that comprise an oligonucleotide; a divalent metal cation; and a carboxylate, a phospholipid, a phosphatidyl choline, or a sphingomyelin, it is possible to vary the properties of pharmaceutical compositions by varying the amount and/or lipophilicity and/or molecular weight of the carboxylate, phospholipid, phosphatidyl choline, or sphingomyelin.

[0415] Further, when the pharmaceutical compositions that further comprises an organic solvent form a depot when administered to an animal, it is also possible to vary the rate at which the oligonucleotide is released from the drug depot by varying the lipophilicity and/or molecular weight of the amino acid ester or amino acid amide. Generally, the more lipophilic the amino acid ester or amino acid amide, the more slowly the oligonucleotide is released from the depot. Similarly, when the pharmaceutical compositions that further comprises an organic solvent and also further comprise a carboxylate, phospholipid, phosphatidyl choline, sphingomyelin, or a diester or diamide of aspartic or glutamic acid and form a depot when administered to an animal, it is possible to vary the rate at which the oligonucleotide is released from the drug depot by varying the amount and/or lipophilicity and/or molecular weight of the carboxylate, phospholipid, phosphatidyl choline, sphingomyelin, or the diester or diamide of aspartic or glutamic acid.

[0416] Release rates from a precipitate can be measured injecting about 50 μL of the pharmaceutical composition into about 4 mL of deionized water in a centrifuge tube. The time that the pharmaceutical composition is injected into the water is recorded as T=0. After a specified amount of time, T, the sample is cooled to about −9° C. and spun on a centrifuge at about 13,000 rpm for about 20 min. The resulting supernatant is then analyzed by HPLC to determine the amount of oligonucleotide present in the aqueous solution. The amount of oligonucleotide in the pellet resulting from the centrifugation can also be determined by collecting the pellet, dissolving the pellet in about 10 μL of methanol, and analyzing the methanol solution by HPLC to determine the amount of oligonucleotide in the precipitate. The amount of oligonucleotide in the aqueous solution and the amount of oligonucleotide in the precipitate are determined by comparing the peak area for the HPLC peak corresponding to the oligonucleotide against a standard curve of oligonucleotide peak area against concentration of oligonucleotide. Suitable HPLC conditions can be readily determined by one of ordinary skill in the art.

[0417] Methods of Treatment

[0418] The pharmaceutical compositions of the invention are useful in human medicine and veterinary medicine. Accordingly, the invention further relates to a method of treating or preventing a condition in an animal comprising administering to the animal an effective amount of the pharmaceutical composition of the invention.

[0419] In one embodiment, the invention relates to methods of treating a condition in an animal comprising administering to an animal in need thereof an effective amount of a pharmaceutical composition of the invention.

[0420] In one embodiment, the invention relates to methods of preventing a condition in an animal comprising administering to an animal in need thereof an effective amount of a pharmaceutical composition of the invention.

[0421] Methods of administration include, but are not limited to, intradermal, intramuscular, intraperitoneal, intravenous, subcutaneous, intranasal, epidural, oral, sublingual, intracerebral, intravaginal, transdermal, rectal, by inhalation, or topical. The mode of administration is left to the discretion of the practitioner. In some embodiments, administration will result in the release of the oligonucleotide of the invention, e.g., a sequence comprising a region according to any one of SEQ ID NOs 4151-14156 or a plurality thereof, or a chimera thereof, into the bloodstream.

[0422] In one embodiment, the method of treating or preventing a condition in an animal comprises administering to the animal in need thereof an effective amount of an oligonucleotide by parenterally administering the pharmaceutical composition of the invention. In one embodiment, the pharmaceutical compositions are administered by infusion or bolus injection. In one embodiment, the pharmaceutical composition is administered subcutaneously.

[0423] In one embodiment, the method of treating or preventing a condition in an animal comprises administering to the animal in need thereof an effective amount of an oligonucleotide by orally administering the pharmaceutical composition of the invention. In one embodiment, the composition is in the form of a capsule or tablet.

[0424] The pharmaceutical compositions can also be administered by any other convenient route, for example, topically, by absorption through epithelial or mucocutaneous linings (e.g., oral, rectal, and intestinal mucosa, etc.).

[0425] The pharmaceutical compositions can be administered systemically or locally.

[0426] The pharmaceutical compositions can be administered together with another biologically active agent.

[0427] In one embodiment, the animal is a mammal.

[0428] In one embodiment the animal is a human.

[0429] In one embodiment, the animal is a non-human animal.

[0430] In one embodiment, the animal is a canine, a feline, an equine, a bovine, an ovine, or a porcine.

[0431] The effective amount administered to the animal depends on a variety of factors including, but not limited to the type of animal being treated, the condition being treated, the severity of the condition, and the specific multipartite construct being administered. A treating physician can determine an effective amount of the pharmaceutical composition to treat a condition in an animal.

[0432] In some embodiments, the compositions and methods of the invention are used to treat a breast cancer. In some embodiments, the breast cancer is a lobular breast cancer. The compositions and methods of the invention can be used to treat these and other cancers.

### Oligonucleotide Probe Methods

[0433] Nucleic acid sequences fold into secondary and tertiary motifs particular to their nucleotide sequence. These motifs position the positive and negative charges on the nucleic acid sequences in locations that enable the sequences to bind to specific locations on target molecules, e.g., proteins and other amino acid sequences. These binding sequences are known in the field as aptamers. Due to the trillions of possible unique nucleotide sequences in even a relatively short stretch of nucleotides (e.g., 10, 11, 12, 13, 14, 15, 16, 17, 18, 19, 20, 21, 22, 23, 24, 25, 26, 27, 28, 29, 30, 31, 32, 33, 34, 35, 36, 37, 38, 39 or 40 nucleotides), a large variety of motifs can be generated, resulting in aptamers for almost any desired protein or other target.

[0434] Aptamers are created by randomly generating oligonucleotides of a specific length, typically 20-80 base pairs long, e.g., 20, 21, 22, 23, 24, 25, 26, 27, 28, 29, 30, 31, 32, 33, 34, 35, 36, 37, 38, 39, 40, 41, 42, 43, 44, 45, 46, 47, 48, 49, 50, 51, 52, 53, 54, 55, 56, 57, 58, 59, 60, 61, 62, 63, 64, 65, 66, 67, 68, 69, 70, 71, 72, 73, 74, 75, 76, 77, 78, 79 or 80 base pairs. These random oligonucleotides are then incubated with the protein target of interest. After several wash steps, the oligonucleotides that bind to the target are collected and amplified. The amplified aptamers are then added to the target and the process is repeated, often 15-20 times. A common version of this process known to those of skill in the art as the SELEX method.

[0435] The end result comprises one or more aptamer with high affinity to the target. The invention provides further processing of such resulting aptamers that can be use to provide desirable characteristics: 1) competitive binding assays to identify aptamers to a desired epitope; 2) motif analysis to identify high affinity binding aptamers in silico; and 3) microvesicle-based aptamer selection assays to identify aptamers that can be used to detect a particular disease. The methods are described in more detail below and further in the Examples.

[0436] The invention further contemplates aptamer sequences that are highly homologous to the sequences that are discovered by the methods of the invention. “High homology” typically refers to a homology of 40% or higher, preferably 60% or higher, more preferably 80% or higher, even more preferably 85%, 90%, 91%, 92%, 93%, 94%, 95%, 96%, 97%, 98%, 99% or higher between a polynucleotide sequence sequence and a reference sequence. In an embodiment, the reference sequence comprises the sequence of one or more aptamer provided herein. Percent homologies (also referred to as percent identity) are typically carried out between two optimally aligned sequences. Methods of alignment of sequences for comparison are well-known in the art. Optimal alignment of sequences and comparison can be conducted, e.g., using the algorithm in “Wilbur and Lipman, Proc Natl Acad Sci USA 80: 726-30 (1983)”. Homology calculations can also be performed using BLAST, which can be found on the NCBI server at: www.ncbi.nlm.nih.gov/BLAST/(Altschul S F, et al, Nucleic Acids Res. 1997; 25(17):3389-402; Altschul S F, et al, J Mol. Biol. 1990; 215(3):403-10). In the case of an isolated polynucleotide which is longer than or equivalent in length to the reference sequence, e.g., a sequence identified by the methods herein, the comparison is made with the full length of the reference sequence. Where the isolated polynucleotide is shorter than the reference sequence, e.g., shorter than a sequence identified by the methods herein, the comparison is made to a segment of the reference sequence of the same length (excluding any loop required by the homology calculation).

[0437] The invention further contemplates aptamer sequences that are functional fragments of the sequences that are discovered by the methods of the invention. In the context of an aptamer sequence, a “functional fragment” of the aptamer sequence may comprise a subsequence that binds to the same target as the full length sequence. In some instances, a candidate aptamer sequence is from a member of a library that contains a 5′ leader sequences and/or a 3′ tail sequence. Such leader sequences or tail sequences may serve to facilitate primer binding for amplification or capture, etc. In these embodiments, the functional fragment of the full length sequence may comprise the subsequence of the candidate aptamer sequence absent the leader and/or tail sequences.

[0438] Competitive Antibody Addition

[0439] Known aptamer production methods may involve eluting all bound aptamers from the target sequence. In some cases, this is not sufficient to identify the desired aptamer sequence. For example, when trying to replace an antibody in an assay, it may be desirable to only collect aptamers that bind to the specific epitope of the antibody being replaced. The invention provides a method comprising addition of an antibody that is to be replaced to the aptamer/target reaction in order to allow for the selective collection of aptamers which bind to the antibody epitope. In an embodiment, the method comprises incubating a reaction mixture comprising randomly generated oligonucleotides with a target of interest, removing unbound aptamers from the reaction mixture that do not bind the target, adding an antibody to the reaction mixture that binds to that epitope of interest, and collecting the aptamers that are displaced by the antibody. The target can be a protein. See, e.g., FIG. 1, which illustrates the method for identifying an aptamer to a specific epitope of EpCam.

[0440] Motif Analysis

[0441] In most aptamer experiments, multiple aptamer sequences are identified that bind to the target. These aptamers will have various binding affinities. It can be time consuming and laborious to generate quantities of these many aptamers sufficient to assess the affinities of each. To identify large numbers of aptamers with the highest affinities without physically screening large subsets, the invention provides a method comprising the analysis of the two dimensional structure of one or more high affinity aptamers to the target of interest. In an embodiment, the method comprises screening the database for aptamers that have similar two-dimensional structures, or motifs, but not necessarily similar primary sequences. In an embodiment, the method comprises identifying a high affinity aptamer using traditional methods such as disclosed herein or known in the art (e.g. surface plasmon resonance binding assay, see FIG. 5), approximating the two-dimensional structure of the high affinity aptamer, and identifying aptamers from a pool of sequences that are predicted to have a similar two-dimensional structure to the high affinity aptamer. The method thereby provides a pool of candidates that also bind the target of interest. The two-dimensional structure of an oligo can be predicting using methods known in the art, e.g., via free energy (AG) calculations performed using a commercially available software program such as Vienna or mFold, for example as described in Mathews, D., Sabina, J., Zucker, M. & Turner, H. Expanded sequence dependence of thermodynamic parameters provides robust prediction of RNA secondary structure. J. Mol. Biol. 288, 911-940 (1999); Hofacker et al., Monatshefte f Chemie 125: 167-188 (1994); and Hofacker, I. L. Vienna RNA secondary structure server. Nucleic Acids Res. 31, 3429-3431 (2003), the contents of which are incorporated herein by reference in their entirety. See FIGS. 3A-3B. The pool of sequences can be sequenced from a pool of randomly generated aptamer candidates using a high-throughput sequencing platform, such as the Ion Torrent platform from Life Technologies. Identifying aptamers from a pool of sequences that are predicted to have a similar two-dimensional structure to the high affinity aptamer may comprise loading the resulting sequences into the software program of choice to identify members of the pool of sequences with similar two-dimensional structures as the high affinity aptamer. The affinities of the pool of sequences can then be determined in situ, e.g., surface plasmon resonance binding assay or the like.

[0442] Aptamer Subtraction Methods

[0443] In order to develop an assay to detect a disease, for example, cancer, one typically screens a large population of known biomarkers from normal and diseased patients in order to identify markers that correlate with disease. This process only works if discriminating markers are already described. In order to address this problem, the invention provides a method comprising subtracting out non-discriminating aptamers from a large pool of aptamers by incubating them initially with non-target microvesicles or cells. The non-target cells can be normal cells or microvesicles shed therefrom. The aptamers that did not bind to the normal microvesicles or cells are then incubated with diseased microvesicles or cells. The aptamers that bind to the diseased microvesicles or cells but that did not bind to the normal cells are then possible candidates for an assay to detect the disease. This process is independent of knowing the existence of a particular marker in the diseased sample.

[0444] Subtraction methods can be used to identify aptamers that preferentially recognize a desired population of targets. In an embodiment, the subtraction method is used to identify aptamers that preferentially recognize target from a diseased target population over a control (e.g., normal or non-diseased) population. The diseased target population may be a population of vesicles from a diseased individual or individuals, whereas the control population comprises vesicles from a non-diseased individual or individuals. The disease can be a cancer or other disease disclosed herein or known in the art. Accordingly, the method provides aptamers that preferentially identify disease targets versus control targets.

[0445] Circulating microvesicles can be isolated from control samples, e.g., plasma from “normal” individuals that are absent a disease of interest, such as an absence of cancer. Vesicles in the sample are isolated using a method disclosed herein or as known in the art. For example, vesicles can be isolated from the plasma by one of the following methods: filtration, ultrafiltration, nanomembrane ultrafiltration, the ExoQuick reagent (System Biosciences, Inc., Mountain View, Calif.), centrifugation, ultracentrifugation, using a molecular crowding reagent (e.g., TEXIS from Life Technologies), polymer precipitation (e.g., polyethylene glycol (PEG)), affinity isolation, affinity selection, immunoprecipitation, chromatography, size exclusion, or a combination of any of these methods. The microvesicles isolated in each case will be a mixture of vesicle types and will be various sizes although ultracentrifugation methods may have more tendencies to produce exosomal-sized vesicles. Randomly generated oligonucleotide libraries (e.g., produced as described in the Examples herein) are incubated with the isolated normal vesicles. The aptamers that do not bind to these vesicles are isolated, e.g., by spinning down the vesicles and collecting the supernatant containing the non-binding aptamers. These non-binding aptamers are then contacted with vesicles isolated from diseased patients (e.g., using the same methods as described above) to allow the aptamers to recognize the disease vesicles. Next, aptamers that are bound to the diseased vesicles are collected. In an embodiment, the vesicles are isolated then lysed using a chaotropic agent (e.g., SDS or a similar detergent), and the aptamers are then captured by running the lysis mixture over an affinity column. The affinity column may comprise streptavidin beads in the case of biotin conjugated aptamer pools. The isolated aptamers are the amplified. The process can then then repeated, e.g., 1, 2, 3, 4, 5, 6, 7, 8, 9, 10, 11, 12, 13, 14, 15, 16, 17, 18, 19 or 20 or more times.

[0446] In one aspect of the invention, an aptamer profile is identified that can be used to characterize a biological sample of interest. In an embodiment, a pool of randomly generated oligonucleotides, e.g., at least 10, 10², 10³, 10⁴, 10⁵, 10⁶, 10⁷, 10⁸, 10⁹, 10¹⁰, 10¹¹, 10¹², 10¹³, 10¹⁴, 10¹⁵, 10¹⁶, 10¹⁷, 10¹⁸, 10¹⁹ or at least 10²⁰ oligonucleotides, is contacted with a biological component or target of interest from a control population. The oligonucleotides that do not bind the biological component or target of interest from the control population are isolated and then contacted with a biological component or target of interest from a test population. The oligonucleotides that bind the biological component or target of interest from the test population are retained. The retained oligonucleotides can be used to repeat the process by contacting the retained oligonucleotides with the biological component or target of interest from the control population, isolating the retained oligonucleotides that do not bind the the biological component or target of interest from the control population, and again contacting these isolated oligonucleotides with the biological component or target of interest from the test population and isolating the binding oligonucleotides. The “component” or “target” can be anything that is present in sample to which the oligonucleotides are capable of binding (e.g., polypeptides, peptide, nucleic acid molecules, carbodyhrates, lipids, etc.). The process can be repeated any number of desired iterations, e.g., 1, 2, 3, 4, 5, 6, 7, 8, 9, 10, 11, 12, 13, 14, 15, 16, 17, 18, 19 or 20 or more times. The resulting oligonucleotides comprise aptamers that can differentially detect the test population versus the control. These aptamers provide an aptamer profile, which comprises a biosignature that is determined using one or more aptamer, e.g., a biosignature comprising a presense or level of the component or target which is detected using the one or more aptamer.

[0447] An exemplary process is illustrated in FIG. 4, which demonstrates the method to identify aptamer that preferentially recognize cancer vesicles using vesicles from normal (non-cancer) individuals as a control. In the figure, exosomes are exemplified but one of skill will appreciate that other microvesicles can be used in the same manner. The resulting aptamers can provide a profile that can differentially detect the cancer vesicles from the normal vesicles. One of skill will appreciate that the same steps can be used to derive an aptamer profile to characterize any disease or condition of interest.

[0448] In an embodiment, the invention provides an isolated polynucleotide that encodes a polypeptide, or a fragment thereof, identified by the methods above. The invention further provides an isolated polynucleotide having a nucleotide sequence that is at least 60% identical to the nucleotide sequence identified by the methods above. More preferably, the isolated nucleic acid molecule is at least 65%, 70%, 75%, 80%, 85%, 90%, 91%, 92%, 93%, 94%, 95%, 96%, 97%, 98%, 99% or more, identical to the nucleotide sequence identified by the methods above. In the case of an isolated polynucleotide which is longer than or equivalent in length to the reference sequence, e.g., a sequence identified by the methods above, the comparison is made with the full length of the reference sequence. Where the isolated polynucleotide is shorter than the reference sequence, e.g., shorter than a sequence identified by the methods above, the comparison is made to a segment of the reference sequence of the same length (excluding any loop required by the homology calculation).

[0449] In a related aspect, the invention provides a method of characterizing a biological phenotype using an aptamer profile. The aptamer profile can be determined using the method above. The aptamer profile can be determined for a test sample and compared to a control aptamer profile. The phenotype may be a disease or disorder such as a cancer. Characterizing the phenotype can include without limitation providing a diagnosis, prognosis, or theranosis. Thus, the aptamer profile can provide a diagnostic, prognostic and/or theranostic readout for the subject from whom the test sample is obtained.

[0450] In another embodiment, an aptamer profile is determined for a test sample by contacting a pool of aptamer molecules to the test sample, contacting the same pool of aptamers to a control sample, and identifying one or more aptamer molecules that differentially bind a component or target in the test sample but not in the control sample (or vice versa). A “component” or “target” as used in the context of the biological test sample or control sample can be anything that is present in sample to which the aptamers are capable of binding (e.g., polypeptides, peptide, nucleic acid molecules, carbodyhrates, lipids, etc.). For example, if a sample is a plasma or serum sample, the aptamer molecules may bind a polypeptide biomarker that is solely expressed or differentially expressed (over- or underexpressed) in a disease state as compared to a non-diseased subject. Comparison of the aptamer profile in the test sample as compared to the control sample may be based on qualitative and quantitative measure of aptamer binding (e.g., binding versus no binding, or level of binding in test sample versus different level of binding in the reference control sample).

[0451] In an aspect, the invention provides a method of identifying a target-specific aptamer profile, comprising contacting a biological test sample with a pool of aptamer molecules, contacting the pool to a control biological sample, identifying one or more aptamers that bind to a component in said test sample but not to the control sample, thereby identifying an aptamer profile for said biological test sample. In an embodiment, a pool of aptamers is selected against a disease sample and compared to a reference sample, the aptamers in a subset that bind to a component(s) in the disease sample but not in the reference sample can be sequenced using conventional sequencing techniques to identify the subset that bind, thereby identifying an aptamer profile for the particular disease sample. In this way, the aptamer profile provides an individualized platform for detecting disease in other samples that are screened. Furthermore, by selecting an appropriate reference or control sample, the aptamer profile can provide a diagnostic, prognostic and/or theranostic readout for the subject from whom the test sample is obtained.

[0452] In a related aspect, the invention provides a method of selecting a pool of aptamers, comprising: (a) contacting a biological control sample with a pool of oligonucleotides; (b) isolating a first subset of the pool of oligonucleotides that do not bind the biological control sample; (c) contacting the biological test sample with the first subset of the pool of oligonucleotides; and (d) isolating a second subset of the pool of oligonucleotides that bind the biological test sample, thereby selecting the pool of aptamers. The pool of oligonucleotides may comprise any number of desired sequences, e.g., at least 10, 10², 10³, 10⁴, 10⁵, 10⁶, 10⁷, 10⁸, 10⁹, 10¹⁰, 10¹¹, 10¹², 10¹³, 10¹⁴, 10¹⁵, 10¹⁶, 10¹⁷, 10¹⁸, 10¹⁹ or at least 10²⁰ oligonucleotides may be present in the starting pool. Steps (a)-(d) may be repeated to further hone the pool of aptamers. In an embodiment, these steps are repeated at least 1, 2, 3, 4, 5, 6, 7, 8, 9, 10, 11, 12, 13, 14, 15, 16, 17, 18, 19 or at least 20 times.

[0453] As described herein, the biological test sample and biological control sample may comprise microvesicles. In an embodiment, the biological test sample and optionally biological control sample comprise a bodily fluid. The bodily fluid may comprise without limitation peripheral blood, sera, plasma, ascites, urine, cerebrospinal fluid (CSF), sputum, saliva, bone marrow, synovial fluid, aqueous humor, amniotic fluid, cerumen, breast milk, broncheoalveolar lavage fluid, semen, prostatic fluid, Cowper's fluid, pre-ejaculatory fluid, female ejaculate, sweat, fecal matter, hair, tears, cyst fluid, pleural fluid, peritoneal fluid, malignant fluid, pericardial fluid, lymph, chyme, chyle, bile, interstitial fluid, menses, pus, sebum, vomit, vaginal secretions, mucosal secretion, stool water, pancreatic juice, lavage fluids from sinus cavities, bronchopulmonary aspirates or other lavage fluids. The biological test sample and optionally biological control may also comprise a tumor sample, e.g., cells from a tumor or tumor tissue. In other embodiments, the biological test sample and optionally biological control sample comprise a cell culture medium. In embodiments, the biological test sample comprises a diseased sample and the biological control sample comprises a non-diseased sample. Accordingly, the pool of aptamers may be used to provide a diagnostic, prognostic and/or theranostic readout a disease.

[0454] As noted, the invention can be used to assess microvesicles. Microvesicles are powerful biomarkers because the vesicles provide one biological entity that comprises multiple pieces of information. For example as described, a vesicle can have multiple surface antigens, each of which provides complementary information. Consider a cancer marker and a tissue specific marker. If both markers are individually present in a sample, e.g., both are circulating proteins or nucleic acids, it may not be ascertainable whether the cancer marker and the tissue specific marker are derived from the same anatomical locale. However, if both the cancer marker and the tissue specific marker are surface antigens on a single microvesicle, the vesicle itself links the two markers and provides an indication of a disease (via the cancer marker) and origin of the disease (via the tissue specific marker). Furthermore, the vesicle can have any number of surface antigens and also payload that can be assessed. Accordingly, the invention provides a method for identifying binding agents comprising contacting a plurality of extracellular microvesicles with a randomly generated library of binding agents, identifying a subset of the library of binding agents that have an affinity to one or more components of the extracellular microvesicles. The binding agents may comprise aptamers, antibodies, and/or any other useful type of binding agent disclosed herein or known in the art.

[0455] In a related aspect, the invention provides a method for identifying a plurality of target ligands comprising, (a) contacting a reference microvesicle population with a plurality of ligands that are capable of binding one or more microvesicle surface markers, (b) isolating a plurality of reference ligands, wherein the plurality of reference ligands comprise a subset of the plurality of ligands that do not have an affinity for the reference microvesicle population; (c) contacting one or more test microvesicle with the plurality of reference ligands; and (d) identifying a subset of ligands from the the plurality of reference ligands that form complexes with a surface marker on the one or more test microvesicle, thereby identifying the plurality of target ligands. The term “ligand” can refer a molecule, or a molecular group, that binds to another chemical entity to form a larger complex. Accordingly, a binding agent comprises a ligand. The plurality of ligands may comprise aptamers, antibodies and/or other useful binding agents described herein or known in the art.

[0456] The invention further provides kits comprising one or more reagent to carry out the methods above. In an embodiment, the one or more reagent comprises a library of potential binding agents that comprises one or more of an aptamer, antibody, and other useful binding agents described herein or known in the art.

[0457] Negative and Positive Aptamer Selection

[0458] Aptamers can be used in various biological assays, including numerous types of assays which rely on a binding agent. For example, aptamers can be used instead of or along side antibodies in immune-based assays. The invention provides an aptamer screening method that identifies aptamers that do not bind to any surfaces (substrates, tubes, filters, beads, other antigens, etc.) throughout the assay steps and bind specifically to an antigen of interest. The assay relies on negative selection to remove aptamers that bind non-target antigen components of the final assay. The negative selection is followed by positive selection to identify aptamers that bind the desired antigen.

[0459] In an aspect, the invention provides a method of identifying an aptamer specific to a target of interest, comprising (a) contacting a pool of candidate aptamers with one or more assay components, wherein the assay components do not comprise the target of interest; (b) recovering the members of the pool of candidate aptamers that do not bind to the one or more assay components in (a); (c) contacting the members of the pool of candidate aptamers recovered in (b) with the target of interest in the presence of one or more confounding target; and (d) recovering a candidate aptamer that binds to the target of interest in step (c), thereby identifying the aptamer specific to the target of interest. In the method, steps (a) and (b) provide negative selection to remove aptamers that bind non-target entities. Conversely, steps (c) and (d) provide positive selection by identifying aptamers that bind the target of interest but not other confounding targets, e.g., other antigens that may be present in a biological sample which comprises the target of interest. The pool of candidate aptamers may comprise at least 10, 10², 10³, 10⁴, 10⁵, 10⁶, 10⁷, 10⁸, 10⁹, 10¹⁰, 10¹¹, 10¹², 10¹³, 10¹⁴, 10¹⁵, 10¹⁶, 10¹⁷, 10¹⁸, 10¹⁹ or at least 10²⁰ nucleic acid sequences. One illustrative approach for performing the method is provided in Example 7.

[0460] In some embodiments, steps (a)-(b) are optional. In other embodiments, steps (a)-(b) are repeated at least 1, 2, 3, 4, 5, 6, 7, 8, 9, 10, 11, 12, 13, 14, 15, 16, 17, 18, 19 or at least 20 times before positive selection in step (c) is performed. The positive selection can also be performed in multiple rounds. Steps (c)-(d) can be repeated at least 1, 2, 3, 4, 5, 6, 7, 8, 9, 10, 11, 12, 13, 14, 15, 16, 17, 18, 19 or at least 20 times before identifying the aptamer specific to the target of interest. Multiple rounds may provide improved stringency of selection.

[0461] In some embodiments, the one or more assay components contacted with the aptamer pool during negative selection comprise one or more of a substrate, a bead, a planar array, a column, a tube, a well, or a filter. One of skill will appreciate that the assay components can include any substance that may be part of a biological assay.

[0462] The target of interest can be any appropriate entity that can be detected when recognized by an aptamer. In an embodiment, the target of interest comprises a protein or polypeptide. As used herein, “protein,” “polypeptide” and “peptide” are used interchangeably unless stated otherwise. The target of interest can be a nucleic acid, including DNA, RNA, and various subspecies of any thereof as disclosed herein or known in the art. The target of interest can comprise a lipid. The target of interest can comprise a carbohydrate. The target of interest can also be a complex, e.g., a complex comprising protein, nucleic acids, lipids and/or carbohydrates. In some embodiments, the target of interest comprises a microvesicle. In such cases, the aptamer can be a binding agent to a microvesicle surface antigen, e.g., a protein. General microvesicle surface antigens include tetraspanin, CD9, CD63, CD81, CD63, CD9, CD81, CD82, CD37, CD53, Rab-5b, Annexin V, and MFG-E8. Additional general microvesicle surface antigens are provided in Table 3 herein.

[0463] The microvesicle surface antigen can also be a biomarker of a disease or disorder. In such cases, the aptamer may be used to provide a diagnosis, prognosis or theranosis of the disease or disorder. For example, the one or more protein may comprise one or more of PSMA, PCSA, B7H3, EpCam, ADAM-10, BCNP, EGFR, IL1B, KLK2, MMP7, p53, PBP, SERPINB3, SPDEF, SSX2, and SSX4. These markers can be used detect a prostate cancer. Additional microvesicle surface antigens are provided in Tables 3-4 herein.

[0464] The one or more confounding target can be an antigen other than the target of interest. For example, a confounding target can be another entity that may be present in a sample to be assayed. As a non-limiting example, consider that the sample to be assessed is a plasma sample from an individual. The target of interest may be a protein, e.g., a microvesicle surface antigen, which is present in the sample. In this case, a confounding target could be selected from any other antigen that is likely to be present in the plasma sample. Accordingly, the positive selection should provide candidate aptamers that recognize the target of interest but have minimal, if any, interactions with the confounding targets. In some embodiments, the target of interest and the one or more confounding target comprise the same type of biological entity, e.g., all protein, all nucleic acid, all carbohydrate, or all lipids. As a non-limiting example, the target of interest can be a protein selected from the group consisting of SSX4, SSX2, PBP, KLK2, SPDEF, and EpCAM, and the one or more confounding target comprises the other members of this group. In other embodiments, the target of interest and the one or more confounding target comprise different types of biological entities, e.g., any combination of protein, nucleic acid, carbohydrate, and lipids. The one or more confounding targets may also comprise different types of biological entities, e.g., any combination of protein, nucleic acid, carbohydrate, and lipids.

[0465] In an embodiment, the invention provides an isolated polynucleotide, or a fragment thereof, identified by the methods above. The invention further provides an isolated polynucleotide having a nucleotide sequence that is at least 60% identical to the nucleotide sequence identified by the methods above. More preferably, the isolated nucleic acid molecule is at least 65%, 70%, 75%, 80%, 85%, 90%, 91%, 92%, 93%, 94%, 95%, 96%, 97%, 98%, 99% or more, identical to the nucleotide sequence identified by the methods above. In the case of an isolated polynucleotide which is longer than or equivalent in length to the reference sequence, e.g., a sequence identified by the methods above, the comparison is made with the full length of the reference sequence. Where the isolated polynucleotide is shorter than the reference sequence, e.g., shorter than a sequence identified by the methods above, the comparison is made to a segment of the reference sequence of the same length (excluding any loop required by the homology calculation).

[0466] In a related aspect, the invention provides a method of selecting a group of aptamers, comprising: (a) contacting a pool of aptamers to a population of microvesicles from a first sample; (b) enriching a subpool of aptamers that show affinity to the population of microvesicles from the first sample; (c) contacting the subpool to a second population of microvesicles from a second sample; and (d) depleting a second subpool of aptamers that show affinity to the second population of microvesicles from the second sample, thereby selecting the group of aptamers that have preferential affinity for the population of microvesicles from the first sample.

[0467] The first sample and/or second sample may comprise a biological fluid such as disclosed herein. For example, the biological fluid may include without limitation blood, a blood derivative, plasma, serum or urine. The first sample and/or second sample may also be derived from a cell culture.

[0468] In an embodiment, the first sample comprises a cancer sample and the second sample comprises a control sample, such as a non-cancer sample. The first sample and/or and the second sample may each comprise a pooled sample. For example, the first sample and/or second sample can comprise bodily fluid from 2, 3, 4, 5, 6, 7, 8, 9, 10, 11, 12, 13, 14, 15, 16, 17, 18, 19, 20, 25, 30, 40, 50, 60, 70, 80, 90, 100 or more than 100 individuals. In such cases, the members of a pool may be chosen to represent a desired phenotype. In a non-limiting example, the members of the first sample pool may be from patients with a cancer and the members of the second sample pool may be from non-cancer controls.

[0469] Steps (a)-(d) can be repeated a desired number of times in order to further enrich the pool in aptamers that have preferential affinity for the population of microvesicles from the first sample. For example, steps (a)-(d) can be repeated 1, 2, 3, 4, 5, 6, 7, 8, 9, 10, 11, 12, 13, 14, 15, 16, 17, 18, 19, 20 or more than 20 times. The output from step (d) can be used as the input to repeated step (a). In embodiment, the first sample and/or second sample are replaced with a different sample before repeating steps (a)-(d). In a non-limiting example, members of a first sample pool may be from patients with a cancer and members of a second sample pool may be from non-cancer controls. During subsequent repetitions of steps (a)-(d), the first sample pool may comprise samples from different cancer patients than in the prior round/s. Similarly, the second sample pool may comprise samples from different controls than in the prior round/s.

[0470] In still another related aspect, the invention provides a method of enriching a plurality of oligonucleotides, comprising: (a) contacting a first microvesicle population with the plurality of oligonucleotides; (b) fractionating the first microvesicle population contacted in step (a) and recovering members of the plurality of oligonucleotides that fractionated with the first microvesicle population; (c) contacting the recovering members of the plurality of oligonucleotides from step (b) with a second microvesicle population; (d) fractionating the second microvesicle population contacted in step (c) and recovering members of the plurality of oligonucleotides that did not fractionate with the second microvesicle population; (e) contacting the recovering members of the plurality of oligonucleotides from step (d) with a third microvesicle population; and (f) fractionating the third microvesicle population contacted in step (a) and recovering members of the plurality of oligonucleotides that fractionated with the third microvesicle population; thereby enriching the plurality of oligonucleotides. The first and third microvesicle populations may have a first phenotype while the second microvesicle population has a second phenotype. Thus, positive selection occurs for the microvesicle populations associated with the first phenotype and negative selection occurs for the microvesicle populations associated with the second phenotype. An example of such selection schemes is described in Example 18 herein, wherein the first phenotype comprises biopsy-positive breast cancer and the second phenotype comprises non-breast cancer (biopsy-negative or healthy).

[0471] In some embodiments, the first phenotype comprises a medical condition, disease or disorder and the second phenotype comprises a healthy state or a different state of the medical condition, disease or disorder. The first phenotype can be a healthy state and the second phenotype comprises a medical condition, disease or disorder. The medical condition, disease or disorder can be any detectable medical condition, disease or disorder, including without limitation a cancer, a premalignant condition, an inflammatory disease, an immune disease, an autoimmune disease or disorder, a cardiovascular disease or disorder, neurological disease or disorder, infectious disease or pain. Various types of such conditions are disclosed herein. See, e.g., Section “Phenotypes” herein.

[0472] Any useful method to isolate microvesicles in whole or in part can be used to fractionate the samples. See, e.g., Section “Microvesicle Isolation and Analysis” herein. In an embodiment, the fractionating comprises ultracentrifugation in step (b) and polymer precipitation in steps (d) and (f). The polymer can be polyethylene glycol (PEG). Any appropriate form of PEG may be used. For example, the PEG may be PEG 8000. The PEG may be used at any appropriate concentration. For example, the PEG can be used at a concentration of 1%, 2%, 3%, 4%, 5%, 6%, 7%, 8%, 9%, 10%, 11%, 12%, 13%, 14% or 15% to isolate the microvesicles. In some embodiments, the PEG is used at a concentration of 6%.

[0473] The contacting can be performed in the presence of a competitor, which may reduce non-specific binding events. Any useful competitor can be used. In an embodiment, the competitor comprises at least one of salmon sperm DNA, tRNA, dextran sulfate and carboxymethyl dextran. As desired, different competitors or competitor concentrations can be used at different contacting steps.

[0474] The method can be repeated to achieve a desired enrichment. In an embodiment, steps (a)-(f) are repeated at least once. These steps can be repeated 1, 2, 3, 4, 5, 6, 7, 8, 9, 10, 11, 12, 13, 14, 15, 16, 17, 18, 19, 20, or more than 20 times as desired. At the same time, each of the contacting steps can be repeated as desired. In some embodiments, the method further comprises: (i) repeating steps (a)-(b) at least once prior to step (c), wherein the recovered members of the plurality of oligonucleotides that fractionated with the first microvesicle population in step (b) are used as the input plurality of oligonucleotides for the repetition of step (a); (ii) repeating steps (c)-(d) at least once prior to step (e), wherein the recovered members of the plurality of oligonucleotides that did not fractionate with the second microvesicle population in step (d) are used as the input plurality of oligonucleotides for the repetition of step (c); and/or (iii) repeating steps (e)-(f) at least once, wherein the recovered members of the plurality of oligonucleotides that fractionated with the third microvesicle population in step (f) are used as the input plurality of oligonucleotides for the repetition of step (e). Repetitions (i)-(iii) can be repeated any desired number of times, e.g., (i)-(iii) can be repeated 1, 2, 3, 4, 5, 6, 7, 8, 9, 10, 11, 12, 13, 14, 15, 16, 17, 18, 19, 20 or more than 20 times. In an embodiment, (i)-(iii) each comprise three repetitions.

[0475] The method may further comprise identifying the members of the selected group of aptamers or oligonucleotides, e.g., by DNA sequencing. The sequencing may be performed by Next Generation sequencing as desired and after or before any desired step in the method.

[0476] The method may also comprise identifying the targets of the selected group of aptamers/oligonucleotides. Methods to identify such targets are disclosed herein.

[0477] Oligonucleotide Probe Target Identification

[0478] The methods and kits above can be used to identify binding agents that differentiate between two biomarker populations. The invention further provides methods of identifying the targets of binding agent. For example, the methods may further comprise identifying a surface marker of a target microvesicle that is recognized by the binding agent.

[0479] In an embodiment, the invention provides a method of identifying a target of a binding agent comprising: (a) contacting the binding agent with the target to bind the target with the binding agent, wherein the target comprises a surface antigen of a microvesicle; (b) disrupting the microvesicle under conditions which do not disrupt the binding of the target with the binding agent; (c) isolating the complex between the target and the binding agent; and (d) identifying the target bound by the binding agent. The binding agent can be a binding agent identified by the methods above, e.g., an aptamer, ligand, antibody, or other useful binding agent that can differentiate between two populations of biomarkers.

[0480] An illustrative schematic for carrying on the method is shown in FIG. 9. The figure shows a binding agent 902, here an oligonucleotide probe or aptamer for purposes of illustration, tethered to a substrate 901. The binding agent 902 can be covalently attached to substrate 901. The binding agent 902 may also be non-covalently attached. For example, binding agent 902 can comprise a label which can be attracted to the substrate, such as a biotin group which can form a complex with an avidin/streptavidin molecule that is covalently attached to the substrate. This can allow a complex to be formed between the aptamer and the microvesicle while in solution, followed by capture of the aptamer using the biotin label. The binding agent 902 binds to a surface antigen 903 of microvesicle 904. In the step signified by arrow (i), the microvesicle is disrupted while leaving the complex between the binding agent 902 and surface antigen 903 intact. Disrupted microvesicle 905 is removed, e.g., via washing or buffer exchange, in the step signified by arrow (ii). In the step signified by arrow (iii), the surface antigen 903 is released from the binding agent 902. The surface antigen 903 can be analyzed to determine its identity using methods disclosed herein and/or known in the art. The target of the method can be any useful biological entity associated with a microvesicle. For example, the target may comprise a protein, nucleic acid, lipid or carbohydrate, or other biological entity disclosed herein or known in the art.

[0481] In some embodiments of the method, the target is cross-linked to the binding agent prior disrupting the microvesicle. Without being bound by theory, this step may assist in maintaining the complex between the binding agent and the target while the vesicle is disrupted. Any useful method of crosslinking disclosed herein or known in the art can be used. In embodiments, the cross-linking comprises photocrosslinking, an imidoester crosslinker, dimethyl suberimidate, an N-Hydroxysuccinimide-ester crosslinker, bissulfosuccinimidyl suberate (BS3), an aldehyde, acrolein, crotonaldehyde, formaldehyde, a carbodiimide crosslinker, N,N′-dicyclohexylcarbodiimide (DDC), N,N′-diisopropylcarbodiimide (DIC), 1-Ethyl-3-[3-dimethylaminopropyl]carbodiimide hydrochloride (EDC or EDAC), Succinimidyl-4-(N-maleimidomethyl)cyclohexane-1-carboxylate (SMCC), a Sulfosuccinimidyl-4-(N-maleimidomethyl)cyclohexane-1-carboxylate (Sulfo-SMCC), a Sulfo-N-hydroxysuccinimidyl-2-(6-[biotinamido]-2-(p-azido benzamido)-hexanoamido) ethyl-1,3′-dithioproprionate (Sulfo-SBED), 2-[N2-(4-Azido-2,3,5,6-tetrafluorobenzoyl)-N6-(6-biotin-amidocaproyl)-L-lysinyl]ethyl methanethiosulfonate (Mts-Atf-Biotin; available from Thermo Fisher Scientific Inc, Rockford Ill.), 2-{N2-[N6-(4-Azido-2,3,5,6-tetrafluorobenzoyl-6-amino-caproyl)-N6-(6-biotinamidocaproyl)-L-lysinylamido]}ethyl methanethiosultonate (Mts-Atf-LC-Biotin; available from Thermo Fisher Scientific Inc), a photoreactive amino acid (e.g., L-Photo-Leucine and L-Photo-Methionine, see, e.g., Suchanek, M., et al. (2005). Photo-leucine and photo-methionine allow identification of protein-protein interactions. Nat. Methods 2:261-267), an N-Hydroxysuccinimide (NHS) crosslinker, an NHS-Azide reagent (e.g., NHS-Azide, NHS-PEG4-Azide, NHS-PEG12-Azide; each available from Thermo Fisher Scientific, Inc.), an NHS-Phosphine reagent (e.g., NHS-Phosphine, Sulfo-NHS-Phosphine; each available from Thermo Fisher Scientific, Inc.), or any combination or modification thereof.

[0482] A variety of methods can be used to disrupt the microvesicle. For example, the vesicle membrane can be disrupted using mechanical forces, chemical agents, or a combination thereof. In embodiments, disrupting the microvesicle comprises use of one or more of a detergent, a surfactant, a solvent, an enzyme, or any useful combination thereof. The enzyme may comprise one or more of lysozyme, lysostaphin, zymolase, cellulase, mutanolysin, a glycanase, a protease, and mannase. The detergent or surfactant may comprise one or more of a octylthioglucoside (OTG), octyl beta-glucoside (OG), a nonionic detergent, Triton X, Tween 20, a fatty alcohol, a cetyl alcohol, a stearyl alcohol, cetostearyl alcohol, an oleyl alcohol, a polyoxyethylene glycol alkyl ether (Brij), octaethylene glycol monododecyl ether, pentaethylene glycol monododecyl ether, a polyoxypropylene glycol alkyl ether, a glucoside alkyl ether, decyl glucoside, lauryl glucoside, octyl glucoside, a polyoxyethylene glycol octylphenol ethers, a polyoxyethylene glycol alkylphenol ether, nonoxynol-9, a glycerol alkyl ester, glyceryl laurate, a polyoxyethylene glycol sorbitan alkyl esters, polysorbate, a sorbitan alkyl ester, cocamide MEA, cocamide DEA, dodecyldimethylamine oxide, a block copolymers of polyethylene glycol and polypropylene glycol, poloxamers, polyethoxylated tallow amine (POEA), a zwitterionic detergent, 3-[(3-cholamidopropyl)dimethylammonio]-1-propanesulfonate (CHAPS), a linear alkylbenzene sulfonate (LAS), a alkyl phenol ethoxylate (APE), cocamidopropyl hydroxysultaine, a betaine, cocamidopropyl betaine, lecithin, an ionic detergent, sodium dodecyl sulfate (SDS), cetrimonium bromide (CTAB), cetyl trimethylammonium chloride (CTAC), octenidine dihydrochloride, cetylpyridinium chloride (CPC), benzalkonium chloride (BAC), benzethonium chloride (BZT), 5-Bromo-5-nitro-1,3-dioxane, dimethyldioctadecylammonium chloride, dioctadecyldimethylammonium bromide (DODAB), sodium deoxycholate, nonyl phenoxypolyethoxylethanol (Tergitol-type NP-40; NP-40), ammonium lauryl sulfate, sodium laureth sulfate (sodium lauryl ether sulfate (SLES)), sodium myreth sulfate, an alkyl carboxylate, sodium stearate, sodium lauroyl sarcosinate, a carboxylate-based fluorosurfactant, perfluorononanoate, perfluorooctanoate (PFOA or PFO), and a biosurfactant. Mechanical methods of disruption that can be used comprise without limitation mechanical shear, bead milling, homogenation, microfluidization, sonication, French Press, impingement, a colloid mill, decompression, osmotic shock, thermolysis, freeze-thaw, desiccation, or any combination thereof.

[0483] As shown in FIG. 9, the binding agent may be tethered to a substrate. The binding agent can be tethered before or after the complex between the binding agent and target is formed. The substrate can be any useful substrate such as disclosed herein or known in the art. In an embodiment, the substrate comprises a microsphere. In another embodiment, the substrate comprises a planar substrate. The binding agent can also be labeled. Isolating the complex between the target and the binding agent may comprise capturing the binding agent via the label. For example, the label can be a biotin label. In such cases, the binding agent can be attached to the substrate via a biotin-avidin binding event.

[0484] Methods of identifying the target after release from the binding agent will depend on the type of target of interest. For example, when the target comprises a protein, identifying the target may comprise use of mass spectrometry (MS), peptide mass fingerprinting (PMF; protein fingerprinting), sequencing, N-terminal amino acid analysis, C-terminal amino acid analysis, Edman degradation, chromatography, electrophoresis, two-dimensional gel electrophoresis (2D gel), antibody array, and immunoassay. Nucleic acids can be identified by sequencing.

[0485] One of skill will appreciate that the method can be used to identify any appropriate target, including those not associated with a vesicle. For example, with respect to the FIG. 9, all steps except for the step signified by arrow (i) (i.e., disrupting the microvesicle), could be performed for a circulating target such as a protein, nucleic acid, lipid, carbohydrate, or combination thereof. The target can be any useful target, including without limitation a cell, an organelle, a protein complex, a lipoprotein, a carbohydrate, a microvesicle, a virus, a membrane fragment, a small molecule, a heavy metal, a toxin, a drug, a nucleic acid, mRNA, microRNA, a protein-nucleic acid complex, and various combinations, fragments and/or complexes of any of these.

[0486] In an aspect, the invention provides a method of identifying at least one protein associated with at least one microvesicle in a biological sample, comprising: a) contacting the at least one microvesicle with an oligonucleotide probe library, b) isolating at least one protein bound by at least one member of the oligonucleotide probe library in step a); and c) identifying the at least one protein isolated in step b). The isolating can be performed using any useful method such as disclosed herein, e.g., by immunopreciption or capture to a substrate. Similarly, the identifying can be performed using any useful method such as disclosed herein, including without limitation use of mass spectrometry, 2-D gel electrophoresis or an antibody array. Examples of such methodology are presented herein in Examples 23-25.

[0487] The targets identified by the methods of the invention can be detected, e.g., using the oligonucleotide probes of the invention, for various purposes as desired. For example, an identified microvesicle surface antigen can then be used to detect a microvesicle. In an aspect, the invention provides a method of detecting at least one microvesicle in a biological sample comprising contacting the biological sample with at least one binding agent to at least one microvesicle surface antigen and detecting the at least one microvesicle recognized by the binding agent to the at least one protein. In an embodiment, the at least one microvesicle surface antigen is selected from Tables 3-4 herein. The at least one microvesicle surface antigen can be a protein in any of Tables 18-25. See Example 23. The at least one binding agent may comprise any useful binding agent, including without limitation a nucleic acid, DNA molecule, RNA molecule, antibody, antibody fragment, aptamer, peptoid, zDNA, peptide nucleic acid (PNA), locked nucleic acid (LNA), lectin, peptide, dendrimer, membrane protein labeling agent, chemical compound, or a combination thereof. In some embodiments, the at least one binding agent comprises at least one oligonucleotide, such as an oligonucleotide probe as provided herein.

[0488] The at least one binding agent can be used to capture and/or detect the at least one microvesicle. Methods of detecting biomarkers and microvesicle using binding agents are provided herein. See, e.g., FIGS. 2A-B, which figures describe sandwich assay formats. In some embodiments, the at least one binding agent used to capture the at least one microvesicle is bound to a substrate. Any useful substrate can be used, including without limitation a planar array, a column matrix, or a microbead. See, e.g., FIGS. 2A-B. In some embodiments, the at least one binding agent used to detect the at least one microvesicle is labeled. Various useful labels are provided herein or known in the art, including without limitation a magnetic label, a fluorescent moiety, an enzyme, a chemiluminescent probe, a metal particle, a non-metal colloidal particle, a polymeric dye particle, a pigment molecule, a pigment particle, an electrochemically active species, a semiconductor nanocrystal, a nanoparticle, a quantum dot, a gold particle, a fluorophore, or a radioactive label.

[0489] In an embodiment, the detecting is used to characterize a phenotype. The phenotype can be any appropriate phenotype of interest. In some embodiments, the phenotype is a disease or disorder. The characterizing may comprise providing diagnostic, prognostic and/or theranostic information for the disease or disorder. The characterizing may be performed by comparing a presence or level of the at least one microvesicle to a reference. The reference can be selected per the characterizing to be performed. For example, when the phenotype comprises a disease or disorder, the reference may comprise a presence or level of the at least one microvesicle in a sample from an individual or group of individuals without the disease or disorder. The comparing can be determining whether the presence or level of the microvesicle differs from that of the reference. In some embodiments, the detected at least one microvesicle is found at higher levels in a healthy sample as compared to a diseased sample. In another embodiment, the detected at least one microvesicle is found at higher levels in a diseased sample as compared to a healthy sample. When multiplex assays are performed, e.g., using a plurality of binding agents to different biomarkers, some microvesicle antigens may be observed at a higher level in the biological samples as compared to the reference whereas other microvesicle antigens may be observed at a lower level in the biological samples as compared to the reference.

[0490] The method can be used to detect the at least one microvesicle in any appropriate biological sample. For example, the biological sample may comprise a bodily fluid, tissue sample or cell culture. The bodily fluid or tissue sample can be from a subject having or suspected of having a medical condition, a disease or a disorder. Thus, the method can be used to provide a diagnostic, prognostic, or theranostic read out for the subject. Any appropriate bodily fluid can be used, including without limitation peripheral blood, sera, plasma, ascites, urine, cerebrospinal fluid (CSF), sputum, saliva, bone marrow, synovial fluid, aqueous humor, amniotic fluid, cerumen, breast milk, broncheoalveolar lavage fluid, semen, prostatic fluid, cowper's fluid or pre-ejaculatory fluid, female ejaculate, sweat, fecal matter, hair oil, tears, cyst fluid, pleural and peritoneal fluid, pericardial fluid, lymph, chyme, chyle, bile, interstitial fluid, menses, pus, sebum, vomit, vaginal secretions, mucosal secretion, stool water, pancreatic juice, lavage fluids from sinus cavities, bronchopulmonary aspirates, blastocyl cavity fluid, or umbilical cord blood.

[0491] The method of the invention can be used to detect or characterize any appropriate disease or disorder of interest, including without limitation Breast Cancer, Alzheimer's disease, bronchial asthma, Transitional cell carcinoma of the bladder, Giant cellular osteoblastoclastoma, Brain Tumor, Colorectal adenocarcinoma, Chronic obstructive pulmonary disease (COPD), Squamous cell carcinoma of the cervix, acute myocardial infarction (AMI)/acute heart failure, Chron's Disease, diabetes mellitus type II, Esophageal carcinoma, Squamous cell carcinoma of the larynx, Acute and chronic leukemia of the bone marrow, Lung carcinoma, Malignant lymphoma, Multiple Sclerosis, Ovarian carcinoma, Parkinson disease, Prostate adenocarcinoma, psoriasis, Rheumatoid Arthritis, Renal cell carcinoma, Squamous cell carcinoma of skin, Adenocarcinoma of the stomach, carcinoma of the thyroid gland, Testicular cancer, ulcerative colitis, or Uterine adenocarcinoma.

[0492] In some embodiments, the disease or disorder comprises a cancer, a premalignant condition, an inflammatory disease, an immune disease, an autoimmune disease or disorder, a cardiovascular disease or disorder, neurological disease or disorder, infectious disease or pain. The cancer can include without limitation one of acute lymphoblastic leukemia; acute myeloid leukemia; adrenocortical carcinoma; AIDS-related cancers; AIDS-related lymphoma; anal cancer; appendix cancer; astrocytomas; atypical teratoid/rhabdoid tumor; basal cell carcinoma; bladder cancer; brain stem glioma; brain tumor (including brain stem glioma, central nervous system atypical teratoid/rhabdoid tumor, central nervous system embryonal tumors, astrocytomas, craniopharyngioma, ependymoblastoma, ependymoma, medulloblastoma, medulloepithelioma, pineal parenchymal tumors of intermediate differentiation, supratentorial primitive neuroectodermal tumors and pineoblastoma); breast cancer; bronchial tumors; Burkitt lymphoma; cancer of unknown primary site; carcinoid tumor; carcinoma of unknown primary site; central nervous system atypical teratoid/rhabdoid tumor; central nervous system embryonal tumors; cervical cancer; childhood cancers; chordoma; chronic lymphocytic leukemia; chronic myelogenous leukemia; chronic myeloproliferative disorders; colon cancer; colorectal cancer; craniopharyngioma; cutaneous T-cell lymphoma; endocrine pancreas islet cell tumors; endometrial cancer; ependymoblastoma; ependymoma; esophageal cancer; esthesioneuroblastoma; Ewing sarcoma; extracranial germ cell tumor; extragonadal germ cell tumor; extrahepatic bile duct cancer; gallbladder cancer; gastric (stomach) cancer; gastrointestinal carcinoid tumor; gastrointestinal stromal cell tumor; gastrointestinal stromal tumor (GIST); gestational trophoblastic tumor; glioma; hairy cell leukemia; head and neck cancer; heart cancer; Hodgkin lymphoma; hypopharyngeal cancer; intraocular melanoma; islet cell tumors; Kaposi sarcoma; kidney cancer; Langerhans cell histiocytosis; laryngeal cancer; lip cancer; liver cancer; lung cancer; malignant fibrous histiocytoma bone cancer; medulloblastoma; medulloepithelioma; melanoma; Merkel cell carcinoma; Merkel cell skin carcinoma; mesothelioma; metastatic squamous neck cancer with occult primary; mouth cancer; multiple endocrine neoplasia syndromes; multiple myeloma; multiple myeloma/plasma cell neoplasm; mycosis fungoides; myelodysplastic syndromes; myeloproliferative neoplasms; nasal cavity cancer; nasopharyngeal cancer; neuroblastoma; Non-Hodgkin lymphoma; nonmelanoma skin cancer; non-small cell lung cancer; oral cancer; oral cavity cancer; oropharyngeal cancer; osteosarcoma; other brain and spinal cord tumors; ovarian cancer; ovarian epithelial cancer; ovarian germ cell tumor; ovarian low malignant potential tumor; pancreatic cancer; papillomatosis; paranasal sinus cancer; parathyroid cancer; pelvic cancer; penile cancer; pharyngeal cancer; pineal parenchymal tumors of intermediate differentiation; pineoblastoma; pituitary tumor; plasma cell neoplasm/multiple myeloma; pleuropulmonary blastoma; primary central nervous system (CNS) lymphoma; primary hepatocellular liver cancer; prostate cancer; rectal cancer; renal cancer; renal cell (kidney) cancer; renal cell cancer; respiratory tract cancer; retinoblastoma; rhabdomyosarcoma; salivary gland cancer; Sézary syndrome; small cell lung cancer; small intestine cancer; soft tissue sarcoma; squamous cell carcinoma; squamous neck cancer; stomach (gastric) cancer; supratentorial primitive neuroectodermal tumors; T-cell lymphoma; testicular cancer; throat cancer; thymic carcinoma; thymoma; thyroid cancer; transitional cell cancer; transitional cell cancer of the renal pelvis and ureter; trophoblastic tumor; ureter cancer; urethral cancer; uterine cancer; uterine sarcoma; vaginal cancer; vulvar cancer; Waldenström macroglobulinemia; or Wilm's tumor. The premalignant condition can include without limitation Barrett's Esophagus. The autoimmune disease can include without limitation one of inflammatory bowel disease (IBD), Crohn's disease (CD), ulcerative colitis (UC), pelvic inflammation, vasculitis, psoriasis, diabetes, autoimmune hepatitis, multiple sclerosis, myasthenia gravis, Type I diabetes, rheumatoid arthritis, psoriasis, systemic lupus erythematosis (SLE), Hashimoto's Thyroiditis, Grave's disease, Ankylosing Spondylitis Sjogrens Disease, CREST syndrome, Scleroderma, Rheumatic Disease, organ rejection, Primary Sclerosing Cholangitis, or sepsis. The cardiovascular disease can include without limitation one of atherosclerosis, congestive heart failure, vulnerable plaque, stroke, ischemia, high blood pressure, stenosis, vessel occlusion or a thrombotic event. The neurological disease can include without limitation one of Multiple Sclerosis (MS), Parkinson's Disease (PD), Alzheimer's Disease (AD), schizophrenia, bipolar disorder, depression, autism, Prion Disease, Pick's disease, dementia, Huntington disease (HD), Down's syndrome, cerebrovascular disease, Rasmussen's encephalitis, viral meningitis, neurospsychiatric systemic lupus erythematosus (NPSLE), amyotrophic lateral sclerosis, Creutzfeldt-Jacob disease, Gerstmann-Straussler-Scheinker disease, transmissible spongiform encephalopathy, ischemic reperfusion damage (e.g. stroke), brain trauma, microbial infection, or chronic fatigue syndrome. The pain can include without limitation one of fibromyalgia, chronic neuropathic pain, or peripheral neuropathic pain. The infectious disease can include without limitation one of a bacterial infection, viral infection, yeast infection, Whipple's Disease, Prion Disease, cirrhosis, methicillin-resistant Staphylococcus aureus, HIV, HCV, hepatitis, syphilis, meningitis, malaria, tuberculosis, or influenza. One of skill will appreciate that oligonucleotide probes or plurality of oligonucleotides or methods of the invention can be used to assess any number of these or other related diseases and disorders.

[0493] In a related aspect, the invention provides a kit comprising a reagent for carrying out the methods herein. In still another related aspect, the invention provides for use of a reagent for carrying out the methods. The reagent may comprise at least one binding agent to the at least one protein. The binding agent may be an oligonucleotide probe as provided herein.

[0494] Sample Characterization

[0495] The aptamers of the invention can be used to characterize a biological sample. For example, an aptamer can be used to bind a biomarker in the sample. The presence or level of the bound biomarker can indicate a characteristic of the example, such as a diagnosis, prognosis or theranosis of a disease or disorder associated with the sample.

[0496] In an aspect, the invention provides an aptamer comprising a nucleic acid sequence that is at least about 50, 55, 60, 65, 70, 75, 80, 85, 90, 95, 96, 97, 98, 99 or 100 percent homologous of any of: a) SEQ ID NOs. 11-24 or a sequence in Table 8; a) SEQ ID NOs. 25-44 or a sequence in Table 11; b) SEQ ID NOs. 47-130 or a sequence in Table 12; or c) a functional variation or fragment of any preceding sequence. A functional variation or fragment includes a sequence comprising modifications that is still capable of binding a target molecule, wherein the modifications comprise without limitation at least one of a deletion, insertion, point mutation, truncation or chemical modification. In a related aspect, the invention provides a method of characterizing a disease or disorder, comprising: (a) contacting a biological test sample with one or more aptamer of the invention, e.g., any of those in this paragraph or modifications thereof, (b) detecting a presence or level of a complex between the one or more aptamer and the target bound by the one or more aptamer in the biological test sample formed in step (a); (c) contacting a biological control sample with the one or more aptamer; (d) detecting a presence or level of a complex between the one or more aptamer and the target bound by the one or more aptamer in the biological control sample formed in step (c); and (e) comparing the presence or level detected in steps (b) and (d), thereby characterizing the disease or disorder.

[0497] The biological test sample and biological control sample can each comprise a tissue sample, a cell culture, or a biological fluid. In some embodiments, the biological test sample and biological control sample comprise the same sample type, e.g., both are tissue samples or both are fluid samples. In other embodiments, different sample types may be used for the test and control samples. For example, the control sample may comprise an engineered or otherwise artificial sample.

[0498] The biological fluid may comprise a bodily fluid. The bodily fluid may include without limitation one or more of peripheral blood, sera, plasma, ascites, urine, cerebrospinal fluid (CSF), sputum, saliva, bone marrow, synovial fluid, aqueous humor, amniotic fluid, cerumen, breast milk, broncheoalveolar lavage fluid, semen, prostatic fluid, cowper's fluid or pre-ejaculatory fluid, female ejaculate, sweat, fecal matter, hair, tears, cyst fluid, pleural and peritoneal fluid, pericardial fluid, lymph, chyme, chyle, bile, interstitial fluid, menses, pus, sebum, vomit, vaginal secretions, mucosal secretion, stool water, pancreatic juice, lavage fluids from sinus cavities, bronchopulmonary aspirates, blastocyl cavity fluid, or umbilical cord blood. In some embodiments, the bodily fluid comprises blood, serum or plasma.

[0499] The biological fluid may comprise microvesicles. For example, the biological fluid can be a tissue, cell culture, or bodily fluid which comprises microvesicles released from cells in the sample. The microvesicles can be circulating microvesicles.

[0500] The one or more aptamer can bind a target biomarker, e.g., a biomarker useful in characterizing the sample. The biomarker may comprise a polypeptide or fragment thereof, or other useful biomarker described herein or known in the art (lipid, carbohydrate, complex, nucleic acid, etc). In embodiments, the polypeptide or fragment thereof is soluble or membrane bound. Membrane bound polypeptides may comprise a cellular surface antigen or a microvesicle surface antigen. The biomarker can be a biomarker selected from Table 3 or Table 4.

[0501] The characterizing can comprises a diagnosis, prognosis or theranosis of the disease or disorder. Various diseases and disorders can be characterized using the compositions and methods of the invention, including without limitation a cancer, a premalignant condition, an inflammatory disease, an immune disease, an autoimmune disease or disorder, a cardiovascular disease or disorder, a neurological disease or disorder, an infectious disease, and/or pain. See, e.g., section herein “Phenotypes” for further details. In embodiments, the disease or disorder comprises a proliferative or neoplastic disease or disorder. For example, the disease or disorder can be a cancer. In some embodiments, the cancer comprises a breast cancer, ovarian cancer, prostate cancer, lung cancer, colorectal cancer, melanoma, or brain cancer.

[0502] FIG. 19A is a schematic 1900 showing an assay configuration that can be used to detect and/or quantify a target of interest using one or more aptamer of the invention. Capture aptamer 1902 is attached to substrate 1901. The substrate can be a planar substrate, well, microbead, or other useful substrate as disclosed herein or known in the art. Target of interest 1903 is bound by capture aptamer 1902. The target of interest can be any appropriate entity that can be detected when recognized by an aptamer or other binding agent. The target of interest may comprise a protein or polypeptide, a nucleic acid, including DNA, RNA, and various subspecies thereof, a lipid, a carbohydrate, a complex, e.g., a complex comprising protein, nucleic acids, lipids and/or carbohydrates. In some embodiments, the target of interest comprises a microvesicle. The target of interest can be a microvesicle surface antigen. The target of interest may be a biomarker, including a vesicle associated biomarker, in Tables 3 or 4. The microvesicle input can be isolated from a sample using various techniques as described herein, e.g., chromatography, filtration, centrifugation, flow cytometry, affinity capture (e.g., to a planar surface, column or bead), and/or using microfluidics. Detection aptamer 1904 is also bound to target of interest 1903. Detection aptamer 1904 carries label 1905 which can be detected to identify target captured to substrate 1901 via capture aptamer 1902. The label can be a fluorescent, radiolabel, enzyme, or other detectable label as disclosed herein. Either capture aptamer 1902 or detection aptamer 1904 can be substituted with another binding agent, e.g., an antibody. For example, the target may be captured with an antibody and detected with an aptamer, or vice versa. When the target of interest comprises a complex, the capture and detection agents (aptamer, antibody, etc) can recognize the same or different targets. For example, when the target is a microvesicle, the capture agent may recognize one microvesicle surface antigen while the detection agent recognizes another microvesicle surface antigen. Alternately, the capture and detection agents can recognize the same surface antigen.

[0503] The aptamers of the invention may be identified and/or used for various purposes in the form of DNA or RNA. Unless otherwise specified, one of skill in the art will appreciate that an aptamer may generally be synthesized in various forms of nucleic acid. The aptamers may also carry various chemical modifications and remain within the scope of the invention.

[0504] In some embodiments, an aptamer of the invention is modified to comprise at least one chemical modification. The modification may include without limitation a chemical substitution at a sugar position; a chemical substitution at a phosphate position; and a chemical substitution at a base position of the nucleic acid. In some embodiments, the modification is selected from the group consisting of: biotinylation, incorporation of a fluorescent label, incorporation of a modified nucleotide, a 2-modified pyrimidine, 3′ capping, conjugation to an amine linker, conjugation to a high molecular weight, non-immunogenic compound, conjugation to a lipophilic compound, conjugation to a drug, conjugation to a cytotoxic moiety, and labeling with a radioisotope, or other modification as disclosed herein. The position of the modification can be varied as desired. For example, the biotinylation, fluorescent label, or cytotoxic moiety can be conjugated to the 5′ end of the aptamer. The biotinylation, fluorescent label, or cytotoxic moiety can also be conjugated to the 3′ end of the aptamer.

[0505] In some embodiments, the cytotoxic moiety is encapsulated in a nanoparticle. The nanoparticle can be selected from the group consisting of: liposomes, dendrimers, and comb polymers. In other embodiments, the cytotoxic moiety comprises a small molecule cytotoxic moiety. The small molecule cytotoxic moiety can include without limtation vinblastine hydrazide, calicheamicin, vinca alkaloid, a cryptophycin, a tubulysin, dolastatin-10, dolastatin-15, auristatin E, rhizoxin, epothilone B, epithilone D, taxoids, maytansinoids and any variants and derivatives thereof. In still other embodiments, the cytotoxic moiety comprises a protein toxin. For example, the protein toxin can be selected from the group consisting of diphtheria toxin, ricin, abrin, gelonin, and Pseudomonas exotoxin A. Non-immunogenic, high molecular weight compounds for use with the invention include polyalkylene glycols, e.g., polyethylene glycol. Appropriate radioisotopes include yttrium-90, indium-111, iodine-131, lutetium-177, copper-67, rhenium-186, rhenium-188, bismuth-212, bismuth-213, astatine-211, and actinium-225. The aptamer may be labeled with a gamma-emitting radioisotope.

[0506] In some embodiments of the invention, an active agent is conjugated to the aptamer. For example, the active agent may be a therapeutic agent or a diagnostic agent. The therapeutic agent may be selected from the group consisting of tyrosine kinase inhibitors, kinase inhibitors, biologically active agents, biological molecules, radionuclides, adriamycin, ansamycin antibiotics, asparaginase, bleomycin, busulphan, cisplatin, carboplatin, carmustine, capecotabine, chlorambucil, cytarabine, cyclophosphamide, camptothecin, dacarbazine, dactinomycin, daunorubicin, dexrazoxane, docetaxel, doxorubicin, etoposide, epothilones, floxuridine, fludarabine, fluorouracil, gemcitabine, hydroxyurea, idarubicin, ifosfamide, irinotecan, lomustine, mechlorethamine, mercaptopurine, melphalan, methotrexate, rapamycin (sirolimus), mitomycin, mitotane, mitoxantrone, nitrosurea, paclitaxel, pamidronate, pentostatin, plicamycin, procarbazine, rituximab, streptozocin, teniposide, thioguanine, thiotepa, taxanes, vinblastine, vincristine, vinorelbine, taxol, combretastatins, discodermolides, transplatinum, anti-vascular endothelial growth factor compounds (“anti-VEGFs”), anti-epidermal growth factor receptor compounds (“anti-EGFRs”), 5-fluorouracil and derivatives, radionuclides, polypeptide toxins, apoptosis inducers, therapy sensitizers, enzyme or active fragment thereof, and combinations thereof.

[0507] Oligonucleotide Pools to Characterize a Sample

[0508] The complexity and heterogeneity present in biology challenges the understanding of biological systems and disease. Diversity exists at various levels, e.g., within and between cells, tissues, individuals and disease states. See, e.g., FIG. 20A. FIG. 20B overviews various biological entities that can be assessed to characterize such samples. As shown in the Figure, as one moves from assessing DNA, to RNA, to protein, and finally to protein complexes, the amount of diversity and complexity increases dramatically. The oligonucleotide probe library method of the invention can be used characterize complex biological sources, e.g., tissue samples, cells, circulating tumor cells, microvesicles, and complexes such as protein and proteolipid complexes.

[0509] Current methods to characterize biological samples may not adequately address such complexity and diversity. As shown in FIG. 20C, such current methods often have a trade off between measuring diversity and complexity. As an example, consider high throughput sequencing technology. Next generation approaches may query many 1000s of molecular targets in a single assay. However, such approaches only probe individual DNA and/or RNA molecules, and thus miss out on the great diversity of proteins and biological complexes. On the other hand, flow cytometry can probe biological complexes, but are limited to a small number of pre-defined ligands. For example, a single assay can probe a handful of differentially labeled antibodies to pre-defined targets.

[0510] The oligonucleotide probe library of the invention address the above challenges with current biological detection technologies. The size of the starting library can be adjusted to measure as many different entities as there are library members. In this Example, the initial untrained oligonucleotide library has the potential to measure 10¹² or more biological features. A larger and/or different library can be constructed as desired. The technology is adapted to find differences between samples without assumptions about what “should be different.” For example, the probe library may distinguish based on individual proteins, protein modifications, protein complexes, lipids, nucleic acids, different folds or conformations, or whatever is there that distinguishes a sample of interest. Thus, the method provides an unbiased approach to identify differences in biological samples that can be used to identify different populations of interest.

[0511] In the context herein, the use of the oligonucleotide library probe to assess a sample may be referred to as Adaptive Dynamic Artificial Poly-ligand Targeting, or ADAPT™ (previously referred to as Topological Oligonucleotide Profiling: TOP™). Although as noted the terms aptamer and oligonucleotides are typically used interchangeable herein, some differences between “classic” individual aptamers and ADAPT probes are as follows. Individual aptamers may comprise individual oligonucleotides selected to bind to a known specific target in an antibody-like “key-in-lock” binding mode. They may be evaluated individually based on specificity and binding affinity to the intended target. However, ADAPT probes may comprise a library of oligonucleotides intended to produce multi-probe signatures. The ADAPT probes comprise numerous potential binding modalities (electrostatic, hydrophobic, Watson-Crick, multi-oligo complexes, etc.). The ADAPT probe signatures have the potential to identify heterogeneous patient subpopulations. For example, a single ADAPT probe library can be assembled to differentiate multiple disease states, as demonstrated herein. Unlike classic single aptamers, the binding targets may or may not be isolated or identified. It will be understood that screening methods that identify individual aptamers, e.g., SELEX, can also be used to enrich a naïve library of oligonucleotides to identify a ADAPT probe library.

[0512] The general method of the invention is outlined in FIG. 20D. One input to the method comprises a randomized oligonucleotide library with the potential to measure 10¹² or more biological features. As outlined in the figure, the method identifies a desired number (e.g., 10⁵-10⁶) that are different between two input sample types. The randomized oligonucleotide library is contacted with a first and a second sample type, and oligonucleotides that bind to each sample are identified. The bound oligonucleotide populations are compared and oligonucleotides that specifically bind to one or the other biological input sample are retained for the oligonucleotide probe library, whereas oligonucleotides that bind both biological input samples are discarded. This trained oligonucleotide probe library can then be contacted with a new test sample and the identities of oligonucleotides that bind the test sample are determined. The test sample is characterized based on the profile of oligonucleotides that bound. See, e.g., FIG. 20H.

[0513] Extracellular vesicles provide an attractive vehicle to profile the biological complexity and diversity driven by many inter-related sources. There can be a great deal of heterogeneity between patient-to-patient microvesicle populations, or even in microvesicle populations from a single patient under different conditions (e.g., stress, diet, exercise, rest, disease, etc). Diversity of molecular phenotypes within microvesicle populations in various disease states, even after microvesicle isolation and sorting by vesicle biomarkers, can present challenges identifying surface binding ligands. This situation is further complicated by vesicle surface-membrane protein complexes. The oligonucleotide probe library can be used to address such challenges and allow for characterization of biological phenotypes. The approach combines the power of diverse oligonucleotide libraries and high throughput (next-generation) sequencing technologies to probe the complexity of extracellular microvesicles. See FIG. 20E.

[0514] ADAPT™ profiling may provide quantitative measurements of dynamic events in addition to detection of presence/absence of various biomarkers in a sample. For example, the binding probes may detect protein complexes or other post-translation modifications, allowing for differentiation of samples with the same proteins but in different biological configurations. Such configurations are illustrated in FIGS. 20F-G. In FIG. 20F, microvesicles with various surface markers are shown from an example microvesicle sample population: Sample Population A. The indicated Bound Probing Oligonucleotides 2001 are contacted to two surface markers 2002 and 2003 in a given special relationship. Here, probes unique to these functional complexes and spatial relationships may be retained. In contrast, in microvesicle Sample Population B shown in FIG. 20F, the two surface markers 2002 and 2003 are found in disparate spacial relationship. Here, probes 2001 are not bound due to absence of the spatial relationship of the interacting components 2002 and 2003.

[0515] An illustrative approach 2010 for using ADAPT profiling to assess a sample is shown in FIG. 20H. The probing library 2011 is mixed with sample 2012. The sample can be as described herein, e.g., a bodily fluid from a subject having or suspected of having a disease. The probes are allowed to bind the sample 2020 and the microvesicles are pelleted 2015. The supernatant 2014 comprising unbound oligonucleotides is discarded. Oligonucleotide probes bound to the pellet 2015 are eluted 2016 and sequenced 2017. The profile 2018 generated by the bound oligonucleotide probes as determined by the sequencing 2017 is used to characterize the sample 2012. For example, the profile 2018 can be compared to a reference, e.g., to determine if the profile is similar or different from a reference profile indicative of a disease or healthy state, or other phenotypic characterization of interest. The comparison may indicate the presence of a disease, provide a diagnosis, prognosis or theranosis, or otherwise characterize a phenotype associated with the sample 2012. FIG. 20 illustrates another schematic for using TOP™ profiling to characterize a phenotype. A patient sample such as a bodily fluid disclosed herein is collected 2021. The sample is contacted with the ADAPT™ library pool 2022. Microvesicles (MVs) are isolated from the contacted sample 2023, e.g., using ultracentrifugation, filtration, polymer precipitation or other appropriate technique or combination of techniques disclosed herein. Oligonucleotides that bound the isolated microvesicles are collected and identity is determined 2024. The identity of the bound oligonucleotides can be determined by any useful technique such as sequencing, high throughput sequencing (e.g., NGS), amplification including without limitation qPCR, or hybridization such as to a planar or particle based array. The identity of the bound oligonucleotides is used to characterize the sample, e.g., as containing disease related microvesicles.

[0516] In an aspect, the invention provides a method of characterizing a sample by contacting the sample with a pool of different oligonucleotides (e.g., an aptamer pool), and determining the frequency at which various oligonucleotides in the pool bind the sample. For example, a pool of oligonucleotides is identified that preferentially bind to microvesicles from cancer patients as compared to non-cancer patients. A test sample, e.g., from a patient suspected of having the cancer, is collected and contacted with the pool of oligonucleotides. Oligonucleotides that bind the test sample are eluted from the test sample, collected and identified, and the composition of the bound oligonucleotides is compared to those known to bind cancer samples. Various sequencing, amplification and hybridization techniques can be used to identify the eluted oligonucleotides. For example, when a large pool of oligonucleotides is used, oligonucleotide identification can be performed by high throughput methods such as next generation sequencing or via hybridization. If the test sample is bound by the oligonucleotide pool in a similar manner (e.g., as determined by bioinformatics classification methods) to the microvesicles from cancer patients, then the test sample is indicative of cancer as well. Using this method, a pool of oligonucleotides that bind one or more microvesicle antigen can be used to characterize the sample without necessarily knowing the precise target of each member of the pool of oligonucleotides. Examples 26-30 and others herein illustrate embodiments of the invention.

[0517] In an aspect, the invention provides a method for characterizing a condition for a test sample comprising: contacting a microvesicle sample with a plurality of oligonucleotide capable of binding one or more target(s) present in said microvesicle sample, identifying a set of oligonucleotides that form a complex with the sample wherein the set is predetermined to characterize a condition for the sample, thereby characterizing a condition for a sample.

[0518] In an related aspect, the invention provides a method for identifying a set of oligonucleotides associated with a test sample, comprising: (a) contacting a microvesicle sample with a plurality of oligonucleotides, isolating a set of oligonucleotides that form a complex with the microvesicle sample, (b) determining sequence and/or copy number for each of the oligonucleotides, thereby identifying a set of oligonucleotides associated with the test sample.

[0519] In still another related aspect, the invention provides a method of diagnosing a sample as cancerous or predisposed to be cancerous, comprising contacting a microvesicle sample with a plurality of oligonucleotides that are predetermined to preferentially form a complex with microvesicles from a cancer sample as compared to microvesicles from a non-cancer sample.

[0520] The oligonucleotides can be identified by sequencing, e.g., by dye termination (Sanger) sequencing or high throughput methods. High throughput methods can comprise techniques to rapidly sequence a large number of nucleic acids, including next generation techniques such as Massively parallel signature sequencing (MPSS; Polony sequencing; 454 pyrosequencing; Illumina (Solexa) sequencing; SOLiD sequencing; Ion Torrent semiconductor sequencing; DNA nanoball sequencing; Heliscope single molecule sequencing; Single molecule real time (SMRT) sequencing, or other methods such as Nanopore DNA sequencing; Tunneling currents DNA sequencing; Sequencing by hybridization; Sequencing with mass spectrometry; Microfluidic Sanger sequencing; Microscopy-based techniques; RNAP sequencing; In vitro virus high-throughput sequencing. The oligonucleotides may also be identified by hybridization techniques. For example, a microarray having addressable locals to hybridize and thereby detect the various members of the pool can be used. Alternately, detection can be based on one or more differentially labelled oligonucleotides that hybridize with various members of the oligonucleotide pool. The detectable signal of the label can be associated with a nucleic acid molecule that hybridizes with a stretch of nucleic acids present in various oligonucleotides. The stretch can be the same or different as to one or more oligonucleotides in a library. The detectable signal can comprise fluorescence agents, including color-coded barcodes which are known, such as in U.S. Patent Application Pub. No. 20140371088, 2013017837, and 20120258870. Other detectable labels (metals, radioisotopes, etc) can be used as desired.

[0521] The plurality or pool of oligonucleotides can comprise any desired number of oligonucleotides to allow characterization of the sample. In various embodiments, the pool comprises at least 2, 3, 4, 5, 6, 7, 8, 9, 10, 11, 12, 13, 14, 15, 16, 17, 18, 19, 20, 25, 30, 40, 50, 60, 70, 80, 90, 100, 150, 200, 250, 300, 350, 400, 450, 500, 600, 700, 800, 900, 1000, 2000, 3000, 4000, 5000, 6000, 7000, 8000, 9000, or at least 10000 different oligonucleotide members.

[0522] The plurality of oligonucleotides can be pre-selected through one or more steps of positive or negative selection, wherein positive selection comprises selection of oligonucleotides against a sample having substantially similar characteristics compared to the test sample, and wherein negative selection comprises selection of oligonucleotides against a sample having substantially different characteristics compared to the test sample. Substantially similar characteristics mean that the samples used for positive selection are representative of the test sample in one or more characteristic of interest. For example, the samples used for positive selection can be from cancer patients or cell lines and the test sample can be a sample from a patient having or suspected to have a cancer. Substantially different characteristics mean that the samples used for negative selection differ from the test sample in one or more characteristic of interest. For example, the samples used for negative selection can be from individuals or cell lines that do not have cancer (e.g., “normal” or otherwise “control” samples) and the test sample can be a sample from a patient having or suspected to have a cancer. The cancer can be a breast cancer, ovarian cancer, prostate cancer, lung cancer, colorectal cancer, melanoma, brain cancer, or other cancer.

[0523] By selecting samples representative of the desired phenotypes to detect and/or distinguish, the characterizing can comprise a diagnosis, prognosis or theranosis for any number of diseases or disorders. Various diseases and disorders can be characterized using the compositions and methods of the invention, including without limitation a cancer, a premalignant condition, an inflammatory disease, an immune disease, an autoimmune disease or disorder, a cardiovascular disease or disorder, a neurological disease or disorder, an infectious disease, and/or pain. See, e.g., section herein “Phenotypes” for further details. In embodiments, the disease or disorder comprises a proliferative or neoplastic disease or disorder. For example, the disease or disorder can be a cancer. In some embodiments, the cancer comprises a breast cancer, ovarian cancer, prostate cancer, lung cancer, colorectal cancer, melanoma, or brain cancer.

[0524] FIG. 19B is a schematic 1910 showing use of an oligonucleotide pool to characterize a phenotype of a sample, such as those listed above. A pool of oligonucleotides to a target of interest is provided 1911. For example, the pool of oligonucleotides can be enriched to target one or more microvesicle. The members of the pool may bind different targets (e.g., a microvesicle surface antigen) or different epitopes of the same target present on the one or more microvesicle. The pool is contacted with a test sample to be characterized 1912. For example, the test sample may be a biological sample from an individual having or suspected of having a given disease or disorder. The mixture is washed to remove unbound oligonucleotides. The remaining oligonucleotides are eluted or otherwise disassociated from the sample and collected 1913. The collected oligonucleotides are identified, e.g., by sequencing or hybridization 1914. The presence and/or copy number of the identified is used to characterize the phenotype 1915. For example, the pool of oligonucleotides may be chosen as oligonucleotides that preferentially recognize microvesicles shed from cancer cells. The method can be employed to detect whether the sample retains oligonucleotides that bind the cancer-related microvesicles, thereby allowing the sample to be characterized as cancerous or not.

[0525] FIG. 19C is a schematic 1920 showing an implementation of the method in FIG. 19B. A pool of oligonucleotides identified as binding a microvesicle population is provided 1919. The input sample comprises a test sample comprising microvesicles 1922. For example, the test sample may be a biological sample from an individual having or suspected of having a given disease or disorder. The pool is contacted with the isolated microvesicles to be characterized 1923. The microvesicle population can be isolated before or after the contacting 1923 from the sample using various techniques as described herein, e.g., chromatography, filtration, ultrafiltration, centrifugation, ultracentrifugation, flow cytometry, affinity capture (e.g., to a planar surface, column or bead), polymer precipitation, and/or using microfluidics. The mixture is washed to remove unbound oligonucleotides and the remaining oligonucleotides are eluted or otherwise disassociated from the sample and collected 1924. The collected oligonucleotides are identified 1925 and the presence and/or copy number of the retained oligonucleotides is used to characterize the phenotype 1926 as above.

[0526] As noted, in embodiment of FIG. 19C, the pool of oligonucleotides 1919 is directly contacted with a biological sample that comprises or is expected to comprise microvesicles. Microvesicles are thereafter isolated from the sample and the mixture is washed to remove unbound oligonucleotides and the remaining oligonucleotides are disassociated and collected 1924. The following steps are performed as above. As an example of this alternate configuration, a biological sample, e.g., a blood, serum or plasma sample, is directly contacted with the pool of oligonucleotides. Microvesicles are then isolated by various techniques disclosed herein, including without limitation ultracentrifugation, ultrafiltration, flow cytometry, affinity isolation, polymer precipitation, chromatography, various combinations thereof, or the like. Remaining oligonucleotides are then identified, e.g., by sequencing, hybridization or amplification.

[0527] In a related aspect, the invention provides a composition of matter comprising a plurality of oligonucleotides that can be used to carry out the methods comprising use of an oligonucleotide pool to characterize a phenotype. The plurality of oligonucleotides can comprise any of those described herein.

[0528] In a related aspect, the invention provides a method of performing high-throughput sequencing comprising: performing at least one (i) negative selection or (ii) one positive selection of a plurality of oligonucleotides with a microvesicle sample; obtaining a set of oliognucleotides to provide a negative binder subset or positive binder subset of the plurality of oligonucleotides, wherein the negative binder subset of the plurality of oligonucleotides does not bind the microvesicle sample and wherein the positive binder subset of the plurality of oligonucleotides does bind the microvesicle sample; contacting the negative binder subset or positive binder subset with a test sample; eluting oligonucleotides that bound to the test sample to provide a plurality of eluate oligonucleotides; and performing high-throughput sequencing of the plurality of eluate oligonucleotides to identify sequence and/or copy number of the members of the plurality of eluate oligonucleotides. Negative and positive selection of the plurality of oligonucleotides using microvesicle sample can be performed as disclosed herein. The oligonucleotide profile revealed by the sequence and/or copy number of the members of the plurality of eluate oligonucleotides can be used to characterize a phenotype of the test sample as described herein.

[0529] In a similar aspect, the invention provides a method for identifying oligonucleotides specific for a test sample. The method comprises: (a) enriching a plurality of oligonucleotides for a sample to provide a set of oligonucleotides predetermined to form a complex with a target sample; (b) contacting the plurality in (a) with a test sample to allow formation of complexes of oligonucleotides with test sample; (c) recovering oligonucleotides that formed complexes in (b) to provide a recovered subset of oligonucleotides; and (d) profiling the recovered subset of oligonucleotides by high-throughput sequencing or hybridization, thereby identifying oligonucleotides specific for a test sample. The test sample may comprise a plurality of microvesicles. The oligonucleotides may comprise RNA, DNA or both. In some embodiment, the method further comprises performing informatics analysis to identify a subset of oligonucleotides comprising sequence identity of at least 50%, 55%, 60%, 65%, 70%, 75%, 80%, 85%, 90%, 91%, 92%, 93%, 94%, 95%, 96%, 97%, 98%, or at least 99% to the oligonucleotides predetermined to form a complex with the target sample.

[0530] One of skill will appreciate that the method can be used to identify any appropriate target, including those not associated with a microvesicle. The target can be any useful target, including without limitation a cell, an organelle, a protein complex, a lipoprotein, a carbohydrate, a microvesicle, a virus, a membrane fragment, a small molecule, a heavy metal, a toxin, a drug, a nucleic acid (including without limitation microRNA (miR) and messenger RNA (mRNA)), a protein-nucleic acid complex, and various combinations, fragments and/or complexes of any of these. The target can, e.g., comprise a mixture of microvesicles and non-microvesicle entities.

[0531] In an aspect, the invention also provides a method comprising contacting an oligonucleotide or plurality of oligonucleotides with a sample and detecting the presence or level of binding of the oligonucleotide or plurality of oligonucleotides to a target in the sample, wherein the oligonucleotide or plurality of oligonucleotides can be those provided by the invention above. The sample may comprise a biological sample, an organic sample, an inorganic sample, a tissue, a cell culture, a bodily fluid, blood, serum, a cell, a microvesicle, a protein complex, a lipid complex, a carbohydrate, or any combination, fraction or variation thereof. The target may comprise a cell, an organelle, a protein complex, a lipoprotein, a carbohydrate, a microvesicle, a membrane fragment, a small molecule, a heavy metal, a toxin, or a drug.

[0532] In a related aspect, the invention provides a method comprising: a) contacting a biological sample comprising microvesicles with an oligonucleotide probe library, wherein optionally the oligonucleotide probe library comprises an oligonucleotide or plurality of oligonucleotides those provided by the invention above; b) identifying oligonucleotides bound to at least a portion of the microvesicles; and c) characterizing the sample based on a profile of the identified oligonucleotides.

[0533] In another aspect, the invention provides a method comprising: a) contacting a sample with an oligonucleotide probe library comprising at least 10⁶, 10⁷, 10⁸, 10⁹, 10¹⁰, 10¹¹, 10¹², 10¹³, 10¹⁴, 10¹⁵, 10¹⁶, 10¹⁷, or at least 10¹⁸ different oligonucleotide sequences oligonucleotides to form a mixture in solution, wherein the oligonucleotides are capable of binding a plurality of entities in the sample to form complexes, wherein optionally the oligonucleotide probe library comprises an oligonucleotide or plurality of oligonucleotides as provided by the invention above; b) partitioning the complexes formed in step (a) from the mixture; and c) detecting oligonucleotides present in the complexes partitioned in step (b) to identify an oligonucleotide profile for the sample. In an embodiment, the detecting step comprises performing sequencing of all or some of the oligonucleotides in the complexes, amplification of all or some of the oligonucleotides in the complexes, and/or hybridization of all or some of the oligonucleotides in the complexes to an array. The array can be any useful array, such as a planar or particle-based array.

[0534] In still another aspect, the invention provides a method for generating an enriched oligonucleotide probe library comprising: a) contacting a first oligonucleotide library with a biological test sample and a biological control sample, wherein complexes are formed between biological entities present in the biological samples and a plurality of oligonucleotides present in the first oligonucleotide library; b) partitioning the complexes formed in step (a) and isolating the oligonucleotides in the complexes to produce a subset of oligonucleotides for each of the biological test sample and biological control sample; c) contacting the subsets of oligonucleotides in (b) with the biological test sample and biological control sample wherein complexes are formed between biological entities present in the biological samples and a second plurality of oligonucleotides present in the subsets of oligonucleotides to generate a second subset group of oligonucleotides; and d) optionally repeating steps b)-c), one, two, three or more times to produce a respective third, fourth, fifth or more subset group of oligonucleotides, thereby producing the enriched oligonucleotide probe library. In a related aspect, the invention provides a plurality of oligonucleotides comprising at least 2, 3, 4, 5, 6, 7, 8, 9, 10, 11, 12, 13, 14, 15, 16, 17, 18, 19, 20, 25, 30, 40, 45, 50, 55, 60, 65, 70, 75, 80, 85, 90, 95, 100, 125, 150, 175, 200, 300, 400, 500, 600, 700, 800, 900, 1000, 2000, 3000, 4000, 5000, 6000, 7000, 8000, 9000, 10000, 20000, 30000, 40000, 50000, 60000, 70000, 80000, 90000, 100000, 200000, 300000, 400000, or 500000 different oligonucleotide sequences, wherein the plurality results from the method in this paragraph, wherein the library is capable of distinguishing a first phenotype from a second phenotype. In some embodiments, the first phenotype comprises a disease or disorder and the second phenotype comprises a healthy state; or wherein the first phenotype comprises a disease or disorder and the second phenotype comprises a different disease or disorder; or wherein the first phenotype comprises a stage or progression of a disease or disorder and the second phenotype comprises a different stage or progression of the same disease or disorder; or wherein the first phenotype comprises a positive response to a therapy and the second phenotype comprises a negative response to the same therapy.

[0535] In yet another aspect, the invention provides a method of characterizing a disease or disorder, comprising: a) contacting a biological test sample with the oligonucleotide or plurality of oligonucleotides provided by the invention; b) detecting a presence or level of complexes formed in step (a) between the oligonucleotide or plurality of oligonucleotides provided by the invention and a target in the biological test sample; and c) comparing the presence or level detected in step (b) to a reference level from a biological control sample, thereby characterizing the disease or disorder. The step of detecting may comprise performing sequencing of all or some of the oligonucleotides in the complexes, amplification of all or some of the oligonucleotides in the complexes, and/or hybridization of all or some of the oligonucleotides in the complexes to an array. The sequencing may be high-throughput or next generation sequencing.

[0536] In the methods of the invention, the biological test sample and biological control sample may each comprise a tissue sample, a cell culture, or a biological fluid. In some embodiments, the biological fluid comprises a bodily fluid. Useful bodily fluids within the method of the invention comprise peripheral blood, sera, plasma, ascites, urine, cerebrospinal fluid (CSF), sputum, saliva, bone marrow, synovial fluid, aqueous humor, amniotic fluid, cerumen, breast milk, broncheoalveolar lavage fluid, semen, prostatic fluid, cowper's fluid or pre-ejaculatory fluid, female ejaculate, sweat, fecal matter, hair, tears, cyst fluid, pleural and peritoneal fluid, pericardial fluid, lymph, chyme, chyle, bile, interstitial fluid, menses, pus, sebum, vomit, vaginal secretions, mucosal secretion, stool water, pancreatic juice, lavage fluids from sinus cavities, bronchopulmonary aspirates, blastocyl cavity fluid, or umbilical cord blood. In some preferred embodiments, the bodily fluid comprises blood, serum or plasma. The biological fluid may comprise microvesicles. In such case, the complexes may be formed between the oligonucleotide or plurality of oligonucleotides and at least one of the microvesicles.

[0537] The biological test sample and biological control sample may further comprise isolated microvesicles, wherein optionally the microvesicles are isolated using at least one of chromatography, filtration, ultrafiltration, centrifugation, ultracentrifugation, flow cytometry, affinity capture (e.g., to a planar surface, column or bead), polymer precipitation, and using microfluidics. The vesicles can also be isolated after contact with the oligonucleotide or plurality of oligonucleotides.

[0538] In various embodiments of the methods of the invention, the oligonucleotide or plurality of oligonucleotides binds a polypeptide or fragment thereof. The polypeptide or fragment thereof can be soluble or membrane bound, wherein optionally the membrane comprises a microvesicle membrane. The membrane could also be from a cell or a fragment of a cell of vesicle. In some embodiments, the polypeptide or fragment thereof comprises a biomarker in Table 3, Table 4 or any one of Tables 18-25. For example, the polypeptide or fragment thereof could be a general vesicle marker such as in Table 3 or a tissue-related or disease-related marker such as in Table 4, or a vesicle associated biomarker provided in any one of Tables 18-25. The oligonucleotide or plurality of oligonucleotides may bind a microvesicle surface antigen in the biological sample. For example, the oligonucleotide or plurality of oligonucleotides can be enriched from a naïve library against microvesicles.

[0539] As noted above, the microvesicles may be isolated in whole or in part using polymer precipitation. In an embodiment, the polymer comprises polyethylene glycol (PEG). Any appropriate form of PEG may be used. For example, the PEG may be PEG 8000. The PEG may be used at any appropriate concentration. For example, the PEG can be used at a concentration of 1%, 2%, 3%, 4%, 5%, 6%, 7%, 8%, 9%, 10%, 11%, 12%, 13%, 14% or 15% to isolate the microvesicles. In some embodiments, the PEG is used at a concentration of 6%.

[0540] The invention provides oligonucleotide probes that can be used to carry out the methods herein. See, e.g., Examples 26-32. In an aspect, the invention provides an oligonucleotide comprising a sequence according to any one of SEQ ID NOs 137-969 and 1072-4150. In a related aspect, the invention provides an oligonucleotide comprising a sequence according to any one of the SEQ ID NOs in Table 40. In another related aspect, the invention provides an oligonucleotide comprising a sequence according to any one of the SEQ ID NOs in the row “2000v1” in Table 43. In still another related aspect, the invention provides an oligonucleotide comprising a sequence according to any one of the SEQ ID NOs in the row “2000v2” in Table 43. In yet another related aspect, the invention provides an oligonucleotide comprising a sequence according to any one of the SEQ ID NOs in the row “Common” in Table 43.

[0541] The oligonucleotides of the invention can comprise flanking regions for various purposes, including without limitation amplification, capture, conjugation or spacing. For example, the invention provides an oligonucleotide comprising a sequence according to any one of the SEQ ID NOs above and further having a 5′ region with sequence 5′-CTAGCATGACTGCAGTACGT (SEQ ID NO. 131) and/or a 3′ region with sequence 5′-CTGTCTCTTATACACATCTGACGCTGCCGACGA (SEQ ID NO. 132).

[0542] The invention further provides oligonucleotides homologous to the SEQ ID NOs above. For example, the invention provides an oligonucleotide comprising a nucleic acid sequence or a portion thereof that is at least 50, 55, 60, 65, 70, 75, 80, 85, 90, 95, 96, 97, 98, 99 or 100 percent homologous to an oligonucleotide sequence of any one of the SEQ ID NOs above. The homologous sequences may comprise similar properties to the listed sequences, such as similar binding properties.

[0543] In an aspect, the invention provides a plurality of oligonucleotides comprising at least 1, 2, 3, 4, 5, 6, 7, 8, 9, 10, 11, 12, 13, 14, 15, 16, 17, 18, 19, 20, 25, 30, 40, 45, 50, 55, 60, 65, 70, 75, 80, 85, 90, 95, 100, 125, 150, 175, 200, 300, 400, 500, 600, 700, 800, 900, 1000, 2000, 3000, 4000, 5000, 6000, 7000, 8000, 9000, or at least 10000 different oligonucleotide sequences as described in the paragraphs above. For example, the invention provides a plurality of oligonucleotides comprising member sequences having at least 1, 2, 3, 4, 5, 6, 7, 8, 9, 10, 11, 12, 13, 14, 15, 16, 17, 18, 19, 20, 25, 30, 40, 45, 50, 55, 60, 65, 70, 75, 80, 85, 90, 95, 100, 125, 150, 175, 200, 300, 400, 500, 600, 700, 800, 900, 1000, 1500, 2000, 2500, 3000, 3500, 4000, or all variable regions according to SEQ ID NOs 137-969 and 1072-4150.

[0544] The plurality of oligonucleotides can comprise at least 1, 2, 3, 4, 5, 6, 7, 8, 9, 10, 11, 12, 13, 14, 15, 16, 17, 18, 19, 20, 25, 30, 40, 45, 50, 55, 60, 65, 70, 75, or all SEQ ID NOs listed in Table 40. In an embodiment, the plurality of oligonucleotides comprises at least the first 1, 2, 3, 4, 5, 6, 7, 8, 9, 10, 11, 12, 13, 14, 15, 16, 17, 18, 19, 20, 25, 30, 40, 45, 50, 55, 60, 65, 70, 75, or SEQ ID NOs listed in Table 40.

[0545] The plurality of oligonucleotides can also comprise at least 1, 2, 3, 4, 5, 6, 7, 8, 9, 10, 11, 12, 13, 14, 15, 16, 17, 18, 19, 20, 25, 30, 40, 45, 50, 55, 60, 65, 70, 75, 80, 85, 90, 95, 100, 125, 150, 175, 200, 225, 250, 275, 300, or all SEQ ID NOs listed in row “2000v1” of Table 43. In an embodiment, the plurality of oligonucleotides comprises at least the first 1, 2, 3, 4, 5, 6, 7, 8, 9, 10, 11, 12, 13, 14, 15, 16, 17, 18, 19, 20, 25, 30, 40, 45, 50, 55, 60, 65, 70, 75, 80, 85, 90, 95, 100, 125, 150, 175, 200, 225, 250, 275, 300, or all SEQ ID NOs listed in row “2000v1” of Table 43.

[0546] The plurality of oligonucleotides can comprise at least 1, 2, 3, 4, 5, 6, 7, 8, 9, 10, 11, 12, 13, 14, 15, 16, 17, 18, 19, 20, 25, 30, 40, 45, 50, 55, 60, 65, 70, 75, 80, 85, 90, 95, 100, 105, 110, 115, 120, 125, 130, 135, 140, 145 or all SEQ ID NOs listed in row “2000v2” of Table 43. In an embodiment, the plurality of oligonucleotides comprises at least the first 1, 2, 3, 4, 5, 6, 7, 8, 9, 10, 11, 12, 13, 14, 15, 16, 17, 18, 19, 20, 25, 30, 40, 45, 50, 55, 60, 65, 70, 75, 80, 85, 90, 95, 100, 105, 110, 115, 120, 125, 130, 135, 140, 145 or all SEQ ID NOs listed in row “2000v2” of Table 43.

[0547] The plurality of oligonucleotides can also comprise at least 1, 2, 3, 4, 5, 6, 7, 8, 9, 10, 11, 12, 13, 14, 15, 16, 17 or all variable regions listed in row “Common” of Table 43. In an embodiment, the plurality of oligonucleotides comprises at least the first 1, 2, 3, 4, 5, 6, 7, 8, 9, 10, 11, 12, 13, 14, 15, 16, 17 or all SEQ ID NOs listed in row “Common” of Table 43.

[0548] The oligonucleotide or at least one member of the plurality of oligonucleotides can have least one functional modification selected from the group consisting of DNA, RNA, biotinylation, a non-naturally occurring nucleotides, a deletion, an insertion, an addition, and a chemical modification. Such modifications may provide additional or altered functions to the oligonucleotides, including without limitation capture, detection, stability, or binding properties.

[0549] Such oligonucleotides and plurality of oligonucleotides (pools) can be used to characterize a phenotype as described herein. In an aspect, the invention provides a method of characterizing a phenotype in a sample comprising: (a) contacting the sample with at least one oligonucleotide or plurality of oligonucleotides provided by the invention (see above); and (b) identifying a presence or level of a complex formed between the at least one oligonucleotide or plurality of oligonucleotides and the sample, wherein the presence or level is used to characterize the phenotype. Any useful technique for identifying can be used according to the invention. In various embodiments, the identifying comprises sequencing, amplification, hybridization, gel electrophoresis or chromatography. In an embodiment, identifying by hybridization comprises contacting the sample with at least one labeled probe that is configured to hybridize with at least one oligonucleotide. The at least one labeled probe can be directly or indirectly attached to a label. Any useful label can be used, including without limitation a fluorescent or magnetic label. In another embodiment, identifying by sequencing comprises next generation sequencing, dye termination sequencing, and/or pyrosequencing.

[0550] In the methods of the invention, the complex formed between the at least one oligonucleotide or the plurality of oligonucleotides and the sample can be a complex formed between a microvesicle population in the sample and the at least one oligonucleotide or plurality of oligonucleotides. The microvesicle population can be isolated in whole or in part from other constituents in the sample before of after the contacting. In embodiments, the isolating uses affinity purification, filtration, polymer precipitation, PEG precipitation, ultracentrifugation, a molecular crowding reagent, affinity isolation, affinity selection, or any combination thereof.

[0551] In the methods of the invention, the phenotype can be any detectable phenotype. In some embodiments, the phenotype comprises a disease or disorder. In such cases, the characterizing can be a diagnosis, prognosis and/or theranosis for the disease or disorder. The theranosis can be any type of therapy-related such as described herein. The theranosis includes without limitation predicting a treatment efficacy or lack thereof, or monitoring a treatment efficacy.

[0552] The characterizing step of the methods of the invention may entail comparing the presence or level to a reference. Any useful reference can be used. In an embodiment wherein the phenotype comprises a disease or disorder, the reference can be the presence or level determined in a sample from an individual without a disease or disorder, or from an individual with a different state of the disease or disorder. In some embodiments, the comparison to the reference of at least one oligonucleotide comprising a sequence having a SEQ ID NO. provided above indicates that the sample comprises a cancer sample or a non-cancer/normal sample.

[0553] The oligonucleotides and panels described above were enriched using pooled samples from disease patients. The invention also provides methods of enriching oligonucleotides using samples from individuals without pooling. See, e.g., Example 35. Such enrichments may require more separate enrichments but can avoid non-hemolytic incompatibility, dilution of certain antigens, or other potential issues. In an aspect, the invention provides a method of enriching an oligonucleotide library comprising a plurality of oligonucleotides, the method comprising: (a) performing at least one round of positive selection, wherein the positive selection comprises: (i) contacting at least one sample with the plurality of oligonucleotides, wherein the at least one sample is from a single patient; and (ii) recovering members of the plurality of oligonucleotides that associated with the at least one sample; and (b) optionally performing at least one round of negative selection, wherein the negative selection comprises: (i) contacting at least one additional sample with the plurality of oligonucleotides, wherein at least one additional sample is from an additional single patient; and (ii) recovering members of the plurality of oligonucleotides that did not associate with the at least one additional sample; and (c) amplifying the members of the plurality of oligonucleotides recovered in at least one or step (a)(ii) and step (b)(ii), thereby enriching the oligonucleotide library. In some embodiments, the recovered members of the plurality of oligonucleotides in step (a)(ii) are used as the input for the next iteration of step (a)(i). In some embodiments, the recovered members of the plurality of oligonucleotides in step (b)(ii) are used as the input for the next iteration of step (a)(i). In some embodiments, the at least one sample is at least 2, 3, 4, 5, 6, 7, 8, 9, 10, 11, 12, 13, 14, 15, 16, 17, 18, 19, 20, 25, 30, 40, 45, 50, 55, 60, 65, 70, 75, 80, 85, 90, 95, or 100 samples. For example, 10 samples with 10 enrichments may be used as desired. In some embodiments, the at least one additional sample is at least 2, 3, 4, 5, 6, 7, 8, 9, 10, 11, 12, 13, 14, 15, 16, 17, 18, 19, 20, 25, 30, 40, 45, 50, 55, 60, 65, 70, 75, 80, 85, 90, 95, or 100 samples. In some embodiments, the unenriched oligonucleotide library comprises at least 2, 3, 4, 5, 6, 7, 8, 9, 10, 11, 12, 13, 14, 15, 16, 17, 18, 19, 20, 25, 30, 40, 45, 50, 55, 60, 65, 70, 75, 80, 85, 90, 95, 100, 125, 150, 175, 200, 300, 400, 500, 600, 700, 800, 900, 1000, 2000, 3000, 4000, 5000, 6000, 7000, 8000, 9000, 10000, 20000, 30000, 40000, 50000, 60000, 70000, 80000, 90000, 100000, 200000, 300000, 400000, 500000, 10⁶, 10⁷, 10⁸, 10⁹, 10¹⁰, 10¹¹, 10¹², 10¹³, 10¹⁴, 10¹⁵, 10¹⁶, 10¹⁷, or at least 10¹⁸ different oligonucleotide sequences. For example, the unenriched oligonucleotide library can be a naïve F-Trin library as described herein.

[0554] In some embodiments, the at least one sample is from a same single patient in multiple iterations of positive selection. In some embodiments, the at least one sample is from a same single patient in at least one repetition of positive selection and is from a different single patient in at least one other iteration of positive selection. In some embodiments, the at least one additional sample is from a same additional single patient in multiple iterations of negative selection. In some embodiments, the at least one additional sample is from a same additional single patient in at least one repetition of negative selection and is from a different additional single patient in other at least one iteration of negative selection. See, e.g., Example 35.

[0555] The invention provides oligonucleotide probes selecting using the enrichment methods with non-pooled samples. In such an aspect, the invention provides an oligonucleotide comprising a sequence according to any one of SEQ ID NOs 4151-14156. In a related aspect, the invention provides an oligonucleotide comprising a sequence according to any sequence in Table 44. The oligonucleotide may consist of a sequence according to any sequence in Table 44. The oligonucleotide can further comprise a 5′ region and/or a 3′ region flanking the sequence according to any sequence in Table 44. In a related aspect, the invention provides an oligonucleotide comprising a sequence according to any one of the SEQ ID NOs 4151-14156 or Table 44 and further having a 5′ region with sequence 5′-CTAGCATGACTGCAGTACGT (SEQ ID NO. 131) and/or a 3′ region with sequence 5′-CTGTCTCTTATACACATCTGACGCTGCCGACGA (SEQ ID NO. 132). In a related aspect, the invention provides an oligonucleotide comprising a nucleic acid sequence or a portion thereof that is at least 50, 55, 60, 65, 70, 75, 80, 85, 90, 95, 96, 97, 98, 99 or 100 percent homologous to an oligonucleotide sequence above. One of skill will appreciate that oligonucleotide aptamers may retain or even improve their ability to recognize their target with certain sequence modifications. Such modifications are within the scope of the invention.

[0556] As noted, the invention provides individual oligonucleotides and also libraries thereof. In an aspect, the invention provides a plurality of oligonucleotides comprising at least 1, 2, 3, 4, 5, 6, 7, 8, 9, 10, 11, 12, 13, 14, 15, 16, 17, 18, 19, 20, 25, 30, 40, 45, 50, 55, 60, 65, 70, 75, 80, 85, 90, 95, 100, 125, 150, 175, 200, 300, 400, 500, 600, 700, 800, 900, 1000, 2000, 3000, 4000, 5000, 6000, 7000, 8000, 9000, or at least 10000 different oligonucleotide sequences provided by the invention, such as those above.

[0557] In some embodiments, the oligonucleotide or members of the plurality of oligonucleotides comprise a DNA, RNA, 2′-O-methyl backbone, phosphorothioate backbone, or any combination thereof. In some embodiments, the oligonucleotide or members of the plurality of oligonucleotides comprise at least one of DNA, RNA, PNA, LNA, UNA, and any combination thereof. In some embodiments, the oligonucleotide or members of the plurality of oligonucleotides comprise at least one functional modification selected from the group consisting of biotinylation, a non-naturally occurring nucleotide, a deletion, an insertion, an addition, and a chemical modification. For example, the chemical modification can be at least one of C18, polyethylene glycol (PEG), PEG4, PEG6, PEG8, PEG12, and an SM(PEG)n crosslinker. In some embodiments, the oligonucleotide or members of the plurality of oligonucleotides are labeled. For example, the oligonucleotide or members of the plurality of oligonucleotides can be attached to a nanoparticle, liposome, gold, magnetic label, fluorescent label, light emitting particle, or radioactive label. Such labeling may allow the oligonucleotide to be detected. Various other useful modifications are disclosed herein.

[0558] The oligonucleotides enriched on non-pooled samples are enriched by binding to desired targets, such as proteins, cells or tissue of interest. Thus, the oligonucleotides of the invention can be used as binding agents in various settings. In one such aspect, the invention provides a method of detecting a target in a sample comprising: (a) contacting the sample with at least one oligonucleotide or plurality of oligonucleotides according to the invention, e.g., according to any one of SEQ ID NOs. 4151-14156 or otherwise enriched via the method above; and (b) identifying a presence or level of a complex formed between the at least one oligonucleotide or plurality of oligonucleotides and the sample. In some embodiments, the presence or level is used to characterize a phenotype. In some embodiments, the identifying comprises sequencing, amplification, hybridization, gel electrophoresis or chromatography. For example, the identifying by hybridization may comprise contacting the sample with at least one labeled probe that is configured to hybridize with at least one oligonucleotide. The at least one labeled probe can be directly or indirectly attached to a label. For example, the label may comprise a fluorescent or magnetic label. Other labels are described herein. As another example, the sequencing may comprise next generation sequencing, dye termination sequencing, and/or pyrosequencing. The phenotype can be a medical condition such as a disease or disorder. In such cases, the characterizing may comprise a diagnosis, prognosis and/or theranosis for the medical condition. For example, the theranosis may be predicting a treatment efficacy or lack thereof, or monitoring a treatment efficacy, or other therapy related diagnostic applications.

[0559] In some embodiments, the complex formed between the at least one oligonucleotide or plurality of oligonucleotides and the sample comprises a complex formed between a microvesicle population in the sample and the at least one oligonucleotide or plurality of oligonucleotides. The microvesicle population can be isolated before or after the contacting using affinity purification, filtration, polymer precipitation, PEG precipitation, F68 ultracentrifugation, a molecular crowding reagent, affinity isolation, affinity selection, or any useful combination thereof. Various means of isolating microvesicles in whole or in part are disclosed herein.

[0560] In some embodiments, the characterizing comprises comparing the presence or level to a reference. The reference can be the presence or level determined in a sample from an individual without a disease or disorder, or from an individual with a different state of a disease or disorder. In some embodiments, the comparison to the reference of at least one oligonucleotide comprising at least one sequence provided by the invention indicates that the sample comprises a cancer sample or a non-cancer/normal sample. See, e.g., Example 35 herein. In some embodiments, the sample comprises a bodily fluid, tissue sample or cell culture. The bodily fluid can be peripheral blood, sera, plasma, ascites, urine, cerebrospinal fluid (CSF), sputum, saliva, bone marrow, synovial fluid, aqueous humor, amniotic fluid, cerumen, breast milk, broncheoalveolar lavage fluid, semen, prostatic fluid, cowper's fluid or pre-ejaculatory fluid, female ejaculate, sweat, fecal matter, hair oil, tears, cyst fluid, pleural and peritoneal fluid, pericardial fluid, lymph, chyme, chyle, bile, interstitial fluid, menses, pus, sebum, vomit, vaginal secretions, mucosal secretion, stool water, pancreatic juice, lavage fluids from sinus cavities, bronchopulmonary aspirates, blastocyl cavity fluid, umbilical cord blood, or any useful combination thereof. In some embodiments, the sample is from a subject suspected of having or being predisposed to a disease or disorder. The disease or disorder may include without limitation a cancer, a premalignant condition, an inflammatory disease, an immune disease, an autoimmune disease or disorder, a cardiovascular disease or disorder, neurological disease or disorder, infectious disease, or pain. For example, the cancer may comprise a breast cancer. In some embodiments, the breast cancer comprises a lobular, ductal or triple negative breast cancer. In some embodiments, the cancer comprises a lobular breast cancer.

[0561] In a related aspect, the invention provides a kit comprising a reagent for carrying out the enrichment or detection/characterization methods of the invention. Similarly, the invention provides use of a reagent for carrying out the enrichment or detection/characterization methods of the invention. The reagent comprises an oligonucleotide or a plurality of oligonucleotides provided by the invention, such as described above. Various other useful reagents are disclosed herein.

[0562] As another use of the oligonucleotides of the invention as binding agents, the oligonucleotides can be used in imaging applications, e.g., medical imaging. In an aspect, the invention provides a method of imaging at least one cell or tissue, comprising contacting the at least one cell or tissue with at least one oligonucleotide or plurality of oligonucleotides according to the invention, such as described above, and detecting the at least one oligonucleotide or the plurality of oligonucleotides in contact with at least one cell or tissue. In some embodiments, the at least one oligonucleotide or the plurality of oligonucleotides is labeled, e.g., using a nanoparticle, liposome, gold, magnetic label, fluorescent label, light emitting particle, radioactive label, or any useful combination thereof. In some embodiments, the at least one oligonucleotide or the plurality of oligonucleotides is administered to a subject prior to the detecting. The at least one cell or tissue can be from a subject suspected of having or being predisposed to a disease or disorder. The at least one cell or tissue may comprise neoplastic, malignant, tumor, hyperplastic, or dysplastic cells. For example, the at least one cell or tissue may comprise lymphoma, leukemia, renal carcinoma, sarcoma, hemangiopericytoma, melanoma, abdominal cancer, gastric cancer, colon cancer, cervical cancer, prostate cancer, pancreatic cancer, breast cancer, or non-small cell lung cancer cells. For example, the cell or tissue may comprise a breast cancer. In some embodiments, the breast cancer comprises a lobular, ductal or triple negative breast cancer. In some embodiments, the breast cancer comprises a lobular breast cancer. As an example, a labeled oligonucleotides or pool thereof can be used to image such cancer in an individual.

[0563] The oligonucleotides selected by non-pooled enrichment can also be used in therapeutic applications, e.g., as a binding agent to target a biomarker or cell of interest. In an aspect, the invention provides a pharmaceutical composition comprising a therapeutically effective amount of the at least one oligonucleotide or the plurality of oligonucleotides according to the invention, such as described above, or a salt thereof, and a pharmaceutically acceptable carrier, diluent, or both. In some embodiments, the at least one oligonucleotide or the plurality of oligonucleotides is attached to a toxin or chemotherapeutic agent. In some embodiments, the at least one oligonucleotide or the plurality of oligonucleotides is attached to a liposome or nanoparticle. For example, the liposome or nanoparticle may comprise a small molecule, drug, toxin, chemotherapeutic agent, or any other useful agent. In a related aspect, the invention provides a method of treating or ameliorating a disease or disorder in a subject in need thereof, comprising administering the composition to the subject. In another related aspect, the invention provides a method of inducing cytotoxicity in a subject, comprising administering the composition to the subject. In still another related aspect, the invention provides a method comprising detecting a transcript or protein in a biological sample from a subject, comparing a presence or level of the transcript to a reference, and administering the composition to the subject based on the comparison. In various embodiments, the administering comprises at least one of intradermal, intramuscular, intraperitoneal, intravenous, subcutaneous, intranasal, epidural, oral, sublingual, intracerebral, intravaginal, transdermal, rectal, by inhalation, topical administration, or any combination thereof. Other useful routes of administration are envisioned by the invention as well.

[0564] In a related therapeutic aspect, the invention provides a nanoparticle conjugated to the at least one oligonucleotide or the plurality of oligonucleotides according to according to the invention, such as described above. In some embodiments, the nanoparticle comprises a small molecule, drug, toxin or chemotherapeutic agent. In some embodiments, the nanoparticle is ≤100 nm in diameter. In a related aspect, the invention provides a pharmaceutical composition comprising a therapeutically effective amount of the nanoparticle, and a pharmaceutically acceptable carrier, diluent, or both. In another related aspect, the invention provides a method of treating or ameliorating a disease or disorder in a subject in need thereof, comprising administering the pharmaceutical composition to the subject. In still another related aspect, the invention provides a method of inducing cytotoxicity in a subject, comprising administering the pharmaceutical composition to the subject. In an aspect, the invention provides a method comprising detecting a transcript or protein in a biological sample from a subject, comparing a presence or level of the transcript to a reference, and administering the pharmaceutical composition to the subject based on the comparison. In various embodiments, the administering comprises at least one of intradermal, intramuscular, intraperitoneal, intravenous, subcutaneous, intranasal, epidural, oral, sublingual, intracerebral, intravaginal, transdermal, rectal, by inhalation, topical administration, or any combination thereof. Other useful routes of administration are envisioned by the invention as well.

[0565] The disease or disorder detected, imaged or treated by the oligonucleotide, plurality of oligonucleotides, or methods provided here may comprise any appropriate disease or disorder of interest, including without limitation Breast Cancer, Alzheimer's disease, bronchial asthma, Transitional cell carcinoma of the bladder, Giant cellular osteoblastoclastoma, Brain Tumor, Colorectal adenocarcinoma, Chronic obstructive pulmonary disease (COPD), Squamous cell carcinoma of the cervix, acute myocardial infarction (AMI)/acute heart failure, Chron's Disease, diabetes mellitus type II, Esophageal carcinoma, Squamous cell carcinoma of the larynx, Acute and chronic leukemia of the bone marrow, Lung carcinoma, Malignant lymphoma, Multiple Sclerosis, Ovarian carcinoma, Parkinson disease, Prostate adenocarcinoma, psoriasis, Rheumatoid Arthritis, Renal cell carcinoma, Squamous cell carcinoma of skin, Adenocarcinoma of the stomach, carcinoma of the thyroid gland, Testicular cancer, ulcerative colitis, or Uterine adenocarcinoma.

[0566] In some embodiments, the disease or disorder comprises a cancer, a premalignant condition, an inflammatory disease, an immune disease, an autoimmune disease or disorder, a cardiovascular disease or disorder, neurological disease or disorder, infectious disease or pain. The cancer can include without limitation one of acute lymphoblastic leukemia; acute myeloid leukemia; adrenocortical carcinoma; AIDS-related cancers; AIDS-related lymphoma; anal cancer; appendix cancer; astrocytomas; atypical teratoid/rhabdoid tumor; basal cell carcinoma; bladder cancer; brain stem glioma; brain tumor (including brain stem glioma, central nervous system atypical teratoid/rhabdoid tumor, central nervous system embryonal tumors, astrocytomas, craniopharyngioma, ependymoblastoma, ependymoma, medulloblastoma, medulloepithelioma, pineal parenchymal tumors of intermediate differentiation, supratentorial primitive neuroectodermal tumors and pineoblastoma); breast cancer; bronchial tumors; Burkitt lymphoma; cancer of unknown primary site; carcinoid tumor; carcinoma of unknown primary site; central nervous system atypical teratoid/rhabdoid tumor; central nervous system embryonal tumors; cervical cancer; childhood cancers; chordoma; chronic lymphocytic leukemia; chronic myelogenous leukemia; chronic myeloproliferative disorders; colon cancer; colorectal cancer; craniopharyngioma; cutaneous T-cell lymphoma; endocrine pancreas islet cell tumors; endometrial cancer; ependymoblastoma; ependymoma; esophageal cancer; esthesioneuroblastoma; Ewing sarcoma; extracranial germ cell tumor; extragonadal germ cell tumor; extrahepatic bile duct cancer; gallbladder cancer; gastric (stomach) cancer; gastrointestinal carcinoid tumor; gastrointestinal stromal cell tumor; gastrointestinal stromal tumor (GIST); gestational trophoblastic tumor; glioma; hairy cell leukemia; head and neck cancer; heart cancer; Hodgkin lymphoma; hypopharyngeal cancer; intraocular melanoma; islet cell tumors; Kaposi sarcoma; kidney cancer; Langerhans cell histiocytosis; laryngeal cancer; lip cancer; liver cancer; lung cancer; malignant fibrous histiocytoma bone cancer; medulloblastoma; medulloepithelioma; melanoma; Merkel cell carcinoma; Merkel cell skin carcinoma; mesothelioma; metastatic squamous neck cancer with occult primary; mouth cancer; multiple endocrine neoplasia syndromes; multiple myeloma; multiple myeloma/plasma cell neoplasm; mycosis fungoides; myelodysplastic syndromes; myeloproliferative neoplasms; nasal cavity cancer; nasopharyngeal cancer; neuroblastoma; Non-Hodgkin lymphoma; nonmelanoma skin cancer; non-small cell lung cancer; oral cancer; oral cavity cancer; oropharyngeal cancer; osteosarcoma; other brain and spinal cord tumors; ovarian cancer; ovarian epithelial cancer; ovarian germ cell tumor; ovarian low malignant potential tumor; pancreatic cancer; papillomatosis; paranasal sinus cancer; parathyroid cancer; pelvic cancer; penile cancer; pharyngeal cancer; pineal parenchymal tumors of intermediate differentiation; pineoblastoma; pituitary tumor; plasma cell neoplasm/multiple myeloma; pleuropulmonary blastoma; primary central nervous system (CNS) lymphoma; primary hepatocellular liver cancer; prostate cancer; rectal cancer; renal cancer; renal cell (kidney) cancer; renal cell cancer; respiratory tract cancer; retinoblastoma; rhabdomyosarcoma; salivary gland cancer; Sézary syndrome; small cell lung cancer; small intestine cancer; soft tissue sarcoma; squamous cell carcinoma; squamous neck cancer; stomach (gastric) cancer; supratentorial primitive neuroectodermal tumors; T-cell lymphoma; testicular cancer; throat cancer; thymic carcinoma; thymoma; thyroid cancer; transitional cell cancer; transitional cell cancer of the renal pelvis and ureter; trophoblastic tumor; ureter cancer; urethral cancer; uterine cancer; uterine sarcoma; vaginal cancer; vulvar cancer; Waldenström macroglobulinemia; or Wilm's tumor. The premalignant condition can include without limitation Barrett's Esophagus. The autoimmune disease can include without limitation one of inflammatory bowel disease (IBD), Crohn's disease (CD), ulcerative colitis (UC), pelvic inflammation, vasculitis, psoriasis, diabetes, autoimmune hepatitis, multiple sclerosis, myasthenia gravis, Type I diabetes, rheumatoid arthritis, psoriasis, systemic lupus erythematosis (SLE), Hashimoto's Thyroiditis, Grave's disease, Ankylosing Spondylitis Sjogrens Disease, CREST syndrome, Scleroderma, Rheumatic Disease, organ rejection, Primary Sclerosing Cholangitis, or sepsis. The cardiovascular disease can include without limitation one of atherosclerosis, congestive heart failure, vulnerable plaque, stroke, ischemia, high blood pressure, stenosis, vessel occlusion or a thrombotic event. The neurological disease can include without limitation one of Multiple Sclerosis (MS), Parkinson's Disease (PD), Alzheimer's Disease (AD), schizophrenia, bipolar disorder, depression, autism, Prion Disease, Pick's disease, dementia, Huntington disease (HD), Down's syndrome, cerebrovascular disease, Rasmussen's encephalitis, viral meningitis, neurospsychiatric systemic lupus erythematosus (NPSLE), amyotrophic lateral sclerosis, Creutzfeldt-Jacob disease, Gerstmann-Straussler-Scheinker disease, transmissible spongiform encephalopathy, ischemic reperfusion damage (e.g. stroke), brain trauma, microbial infection, or chronic fatigue syndrome. The pain can include without limitation one of fibromyalgia, chronic neuropathic pain, or peripheral neuropathic pain. The infectious disease can include without limitation one of a bacterial infection, viral infection, yeast infection, Whipple's Disease, Prion Disease, cirrhosis, methicillin-resistant Staphylococcus aureus, HIV, HCV, hepatitis, syphilis, meningitis, malaria, tuberculosis, or influenza. One of skill will appreciate that the oligonucleotide or plurality of oligonucleotides or methods of the invention can be used to assess any number of these or other related diseases and disorders.

[0567] In some embodiments of the invention, the oligonucleotide or plurality of oligonucleotides and methods of use thereof are useful for characterizing a breast cancer, e.g., a lobular, ductal or triple negative breast cancer. In some embodiments, the cancer comprises a lobular breast cancer. See, e.g., Example 35.

[0568] In some embodiments of the invention, the oligonucleotide or plurality of oligonucleotides and methods of use thereof are useful for characterizing certain diseases or disease states. As desired, a pool of oligonucleotides useful for characterizing various diseases is assembled to create a master pool that can be used to probe useful for characterizing the various diseases. One of skill will also appreciate that pools of oligonucleotides useful for characterizing specific diseases or disorders can be created as well. The sequences provided herein can also be modified as desired so long as the functional aspects are still maintained (e.g., binding to various targets or ability to characterize a phenotype). For example, the oligonucleotides may comprise DNA or RNA, incorporate various non-natural nucleotides, incorporate other chemical modifications, or comprise various deletions or insertions. Such modifications may facilitate synthesis, stability, delivery, labeling, etc, or may have little to no effect in practice. In some cases, some nucleotides in an oligonucleotide may be substituted while maintaining functional aspects of the oligonucleotide. Similarly, 5′ and 3′ flanking regions may be substituted. In still other cases, only a portion of an oligonucleotide may be determined to direct its functionality such that other portions can be deleted or substituted. Numerous techniques to synthesize and modify nucleotides and polynucleotides are disclosed herein or are known in the art.

[0569] In an aspect, the invention provides a kit comprising a reagent for carrying out the methods of the invention provided herein. In a similar aspect, the invention contemplates use of a reagent for carrying out the methods of the invention provided herein. In embodiments, the reagent comprises an oligonucleotide or plurality of oligonucleotides. The oligonucleotide or plurality of oligonucleotides can be those provided herein. The reagent may comprise various other useful components including without limitation microRNA (miR) and messenger RNA (mRNA)), a protein-nucleic acid complex, and various combinations, fragments and/or complexes of any of these. The one or more of: a) a reagent configured to isolate a microvesicle, optionally wherein the at least one reagent configured to isolate a microvesicle comprises a binding agent to a microvesicle antigen, a column, a substrate, a filtration unit, a polymer, polyethylene glycol, F68, PEG4000, PEG8000, a particle or a bead; b) at least one oligonucleotide configured to act as a primer or probe in order to amplify, sequence, hybridize or detect the oligonucleotide or plurality of oligonucleotides; and c) a reagent configured to remove one or more abundant protein from a sample, wherein optionally the one or more abundant protein comprises at least one of albumin, immunoglobulin, fibrinogen and fibrin.

[0570] Recovery of Oligonucleotide Probes Post-Probing

[0571] As described herein, the oligonucleotide probes of the invention can be used to probe a sample in order to characterize a phenotype. The methods may entail recovering the oligonucleotide probes that bound various biological entities in the sample in order to identify the bound probes. In an aspect, the invention provides a method of detecting at least one oligonucleotide in a sample, comprising: (a) providing the at least one oligonucleotide comprising a capture moiety; (b) contacting the sample with the at least one oligonucleotide provided in (a); (c) capturing the at least one oligonucleotide that formed a complex with a component in the sample in (b); and (d) identifying a presence or level of the at least one oligonucleotide captured in (c), wherein optionally the presence or level is used to characterize a phenotype. See, e.g., Example 33 and FIGS. 17A-E. The at least one oligonucleotide may be captured to a substrate, including without limitation a bead or planar substrate. The capture moiety can be any useful capture moiety, including without limitation a biotin moiety. The capture moiety can be cleavable, e.g., photocleavable or chemically cleavable. In an embodiment, the at least one oligonucleotide is captured to a substrate coupled to avidin or streptavidin. Such configuration is particularly useful when the capture moiety comprises a biotin moiety. In some embodiments, the captured at least one oligonucleotide is released from the substrate by irradiation prior to the identifying. Any useful irradiation, e.g., ultra violet (UV) light may be used. Any useful technique for identifying can be used according to the invention. In various embodiments, the identifying comprises sequencing, amplification, hybridization, gel electrophoresis or chromatography. In an embodiment, identifying by hybridization comprises contacting the sample with at least one labeled probe that is configured to hybridize with at least one oligonucleotide. The at least one labeled probe can be directly or indirectly attached to a label. Any useful label can be used, including without limitation a fluorescent or magnetic label. In another embodiment, identifying by sequencing comprises next generation sequencing, dye termination sequencing, and/or pyrosequencing. The at least one oligonucleotide can be an oligonucleotide or plurality of oligonucleotides provided by the invention. See e.g., the oligonucleotides and plurality of oligonucleotides described above.

[0572] Single Strand DNA (ssDNA) Library Preparation

[0573] In an embodiment, the invention provides a nucleic acid molecule comprising a 5′ leader region which is 5′ of a variable region, which is 5′ of a tail region, wherein the leader region comprises a lengthener region, a terminator region and a forward primer region, and the tail region comprises a reverse primer region. The nucleic acid molecule may be used for asymmetric or unequal length PCR applications as desired, e.g., to recover ssDNA. See, e.g., Example 34 and FIGS. 18A-C. The lengthener region can be any desired length. In some embodiments, the lengthener region comprises at least 10, 11, 12, 13, 14, 15, 16, 17, 18, 19, 20, 21, 22, 23, 24, 25, 26, 27, 28, 29, 30, 31, 32, 33, 34, 35, 36, 37, 38, 39, 30, 41, 42, 43, 44, 45, 46, 47, 48, 49, or 50 nucleotides. The lengthener region may comprise a poly-A sequence. Similarly, the terminator region can be any desired length. In some embodiments, the terminator region comprises at least 3, 4, 5, 6, 7, 8, 9, 10, 11, 12, 13, 14, 15, 16, 17, 18, 19, 20, 21, 22, 23, 24, 25, 26, 27, 28, 29, 30, 31, 32, 33, 34, 35, 36, 37, 38, 39, 30, 41, 42, 43, 44, 45, 46, 47, 48, 49, or 50 nucleotides. The terminator region may comprise a non-nucleotide terminator. For example, the non-nucleotide terminator can be a polymer such as triethylene glycol or the like. The forward primer region can be any desired length. In some embodiments, the forward primer region comprises at least 10, 11, 12, 13, 14, 15, 16, 17, 18, 19, 20, 21, 22, 23, 24, 25, 26, 27, 28, 29, 30, 31, 32, 33, 34, 35, 36, 37, 38, 39, 30, 41, 42, 43, 44, 45, 46, 47, 48, 49, or 50 nucleotides. The variable region can be any desired length. In some embodiments, the variable region comprises at least 10, 11, 12, 13, 14, 15, 16, 17, 18, 19, 20, 21, 22, 23, 24, 25, 26, 27, 28, 29, 30, 31, 32, 33, 34, 35, 36, 37, 38, 39, 30, 41, 42, 43, 44, 45, 46, 47, 48, 49, or 50 nucleotides. In some embodiments, the variable region binds a target molecule or complex through non-Watson-Crick base pairing. For example, the variable region may act as an aptamer and bind proteins or other entities. Finally, the reverse primer region can be any desired length. In some embodiments, the reverse primer region comprises at least 10, 11, 12, 13, 14, 15, 16, 17, 18, 19, 20, 21, 22, 23, 24, 25, 26, 27, 28, 29, 30, 31, 32, 33, 34, 35, 36, 37, 38, 39, 30, 41, 42, 43, 44, 45, 46, 47, 48, 49, or 50 nucleotides.

[0574] In a related aspect, the invention provides a method of generating a single-stranded DNA (ssDNA) molecule comprising: a) providing a mixture comprising a nucleic acid molecule as described in the paragraph above, and forward and reverse primers configured to amplify the nucleic acid molecule from the forward primer region and reverse primer region, respectively; and b) performing asymmetric polymerase chain reaction (PCR) on the mixture in a) to favorably amplify the reverse strand of the nucleic acid molecule, wherein the forward and reverse primers in the mixture are at a ratio of at least about 1:5 (F/R) in favor of the reverse primers; thereby generating the ssDNA molecule. In an embodiment, the ratio is between about 1:20-1:50 (F/R) in favor of the reverse primers. For example, the ratio can be between about 1:37.5 (F/R) in favor of the reverse primers. The method may further comprise isolating the amplified reverse strand of the nucleic acid molecule on a native gel. The method may also further comprise: c) denaturing the amplified nucleic acid molecules from b); and d) isolating the denatured reverse strand of the nucleic acid molecules from c). In an embodiment, the denatured reverse strand of the nucleic acid molecules is isolated on a denaturing gel. The mixture in a) can comprise additional components as desired. For example, the mixture may further comprise at least one of an enrichment buffer, non-target molecules, proteins, microvesicles, and polyethyleve glycol.

[0575] In a related aspect, the invention provides a kit comprising a reagent for carrying out the methods herein. In still another related aspect, the invention provides for use of a reagent for carrying out the methods. In various embodiments, the reagent comprises at least one of a buffer, a nucleic acid molecule described above, and forward and/or reverse primers configured to amplify the nucleic acid molecule.

[0576] Detecting Watson-Crick Base Pairing with an Oligonucleotide Probe

[0577] The oligonucleotide probes provided by the invention can bind via non-Watson Crick base pairing. However, in some cases, the oligonucleotide probes provided by the invention can bind via Watson Crick base pairing. The oligonucleotide probe libraries of the invention, e.g., as described above, can query both types of binding events simultaneously. For example, some oligonucleotide probes may bind the microvesicle protein antigens in the classical aptamer sense, whereas other oligonucleotide probes may bind microvesicles via nucleic acids associated with the microvesicles, e.g., nucleic acid (including without limitation microRNA and mRNA) on the surface of the microvesicles or as payload. Such surface bound nucleic acids can be associated with proteins. For example, they may comprise Argonaute-microRNA complexes. The argonaute protein can be Ago1, Ago2, Ago3 and/or Ago4.

[0578] In addition to the oligonucleotide probe library approach described herein which relies on determining a sequence of the oligonucleotides (e.g., via sequencing, hybridization or amplification), assays can also be designed to detect Watson Crick base pairing. In some embodiments, these approaches rely on Ago2-mediated cleavage wherein an Ago2-microRNA complex can be used to detected using oligonucleotide probes. For further details, see PCT/US15/62184, filed Nov. 23, 2015, which application is incorporated by reference herein in its entirety.

[0579] Kits

[0580] The invention also provides a kit comprising one or more reagent to carry out the methods of the invention. For example, the one or more reagent can be the one or more aptamer, a buffer, blocker, enzyme, or combination thereof. The one or more reagent may comprise any useful reagents for carrying out the subject methods, including without limitation aptamer libraries, substrates such as microbeads or planar arrays or wells, reagents for biomarker and/or microvesicle isolation (e.g., via chromatography, filtration, ultrafiltration, centrifugation, ultracentrifugation, flow cytometry, affinity capture (e.g., to a planar surface, column or bead), polymer precipitation, and/or using microfluidics), aptamers directed to specific targets, aptamer pools that facilitate detection of a biomarker/microvesicle population, reagents such as primers for nucleic acid sequencing or amplification, arrays for nucleic acid hybridization, detectable labels, solvents or buffers and the like, various linkers, various assay components, blockers, and the like. The one or more reagent may also comprise various compositions provided by the invention. In an embodiment, the one or more reagent comprises one or more aptamer of the invention. The one or more reagent can comprise a substrate, such as a planar substrate, column or bead. The kit can contain instructions to carry out various assays using the one or more reagent.

[0581] In an embodiment, the kit comprises an oligonucleotide probe or composition provided herein. The kit can be configured to carry out the methods provided herein. For example, the kit can include an aptamer of the invention, a substrate, or both an aptamer of the invention and a substrate.

[0582] In an embodiment, the kit is configured to carry out an assay. For example, the kit can contain one or more reagent and instructions for detecting the presence or level of a biological entity in a biological sample. In such cases, the kit can include one or more binding agent to a biological entity of interest. The one or more binding agent can be bound to a substrate.

[0583] In an embodiment, the kit comprises a set of oligonucleotides that provide a particular oligonucleotide profile for a biological sample. An oligonucleotide profile can include, without limitation, a profile that can be used to characterize a particular disease or disorder. For example, the disease or disorder can be a proliferative disease or disorder, including without limitation a cancer. In some embodiments, the cancer comprises a breast cancer.

### EXAMPLES

### Example 1: Identification of DNA Oligonucleotides that Bind a Target

[0584] The target is affixed to a solid substrate, such as a glass slide or a magnetic bead. For a magnetic bead preparation, beads are incubated with a concentration of target protein ranging from 0.1 to 1 mg/ml. The target protein is conjugated to the beads according to a chemistry provided by the particular bead manufacturer. Typically, this involves coupling via an N-hydroxysuccinimide (NHS) functional group process. Unoccupied NHS groups are rendered inactive following conjugation with the target.

[0585] Randomly generated oligonucleotides (oligos) of a certain length, such as 32 base pairs long, are added to a container holding the stabilized target. Each oligo contains 6 thymine nucleotides (a “thymine tail”) at either the 5 or 3 prime end, along with a single molecule of biotin conjugated to the thymine tail. Additional molecules of biotin could be added. Each oligo is also manufactured with a short stretch of nucleotides on each end (5-10 base pairs long) corresponding to amplification primers for PCR (“primer tails”). The sequences are shown absent the thymine tails or primer tails.

[0586] The oligonucleotides are incubated with the target at a specified temperature and time in phosphate-buffered saline (PBS) at 37 degrees Celsius in 500 microliter reaction volume.

[0587] The target/oligo combination is washed 1-10 times with buffer to remove unbound oligo. The number of washes increases with each repetition of the process (as noted below).

[0588] The oligos bound to the target are eluted using a buffer containing a chaotropic agent such as 7 M urea or 1% SDS and collected using the biotin tag. The oligos are amplified using the polymerase chain reaction using primers specific to 5′ and 3′ sequences added to the randomized region of the oligos. The amplified oligos are added to the target again for another round of selection. This process is repeated as desired to observe binding enrichment.

### Example 2: Competitive Assay

[0589] The process is performed as in Example 1 above, except that a known ligand to the target, such as an antibody, is used to elute the bound oligo species (as opposed to or in addition to the chaotropic agent). In this case, anti-EpCAM antibody from Santa Cruz Biotechnology, Inc. was used to elute the aptamers from the target EpCAM.

### Example 3: Screening and Affinity Analysis

[0590] All aptamers generated from the binding assays described above are sequenced using a high-throughput sequencing platform, such as the Ion Torrent from Life Technologies:

[0591] Library Preparation—Aptamers were pooled after ligating barcodes and adapter sequences (Life Technologies) according to manufacturer protocols. In brief, equimolar pools of the aptamers were made using the following steps: Analyzed an aliquot of each library with a Bioanalyzer™ instrument and Agilent DNA 1000 Kit or Agilent High Sensitivity Kit, as appropriate for the final library concentration. The molar concentration (nmol/L) of each amplicon library was determined using the commercially available software (Agilent).

[0592] An equimolar pool of the library was prepared at the highest possible concentration.

[0593] The combined concentration of the pooled library stock was calculated.

[0594] The template dilution factor of the library pool was determined using the following equation: Template Dilution Factor=(Library pool concentration [pM])/26 pM).

[0595] Template Preparation—Using a freshly diluted library, the aptamer pool resulting from binding assays provided above were sequenced using conventional sequencing protocols. High throughput (NextGen) sequencing methods can be used as desired.

[0596] Twenty aptamers were selected based on direct or competitive assays assessing binding to EpCAM (as described above).

[0597] Affinity Measurements—These twenty aptamers were then tested for binding affinity using an in vitro binding platform. SPR can be used for this step, e.g., a Biacore SPR machine using the T200 control software, as follows:

[0598] Dilute the antigen to a concentration of 32 nM.

[0599] Prepare necessary dilutions for kinetics, starting at 32 nM prepare two-fold dilutions of antigen down to 0.5 nM.

[0600] The Biacore 200 control software is programmed with the following conditions: Solution: HBS-EP+Buffer; Number of cycles: 3; Contact time: 120 s; Flow rate: 30l/min; Dissociation time: 300 s; Solution: Glycine-HCl pH 2.5; Contact time: 120 s; Flow rate: 20 μl/min; Stabilization period: 0 s. The binding affinities of these aptamers are then measured using the SPR assay above, or an alternate in vitro assay assessing the aptamer for a desired function.

[0601] FIG. 5 shows the SPR data for aptamer BTX176881 (SEQ ID NO: 3). The figure comprises an association and dissociation graph of 1:1 fitting model of the biotinylated aptamers to EpCAM protein at the indicated concentrations (nM). Table 5 shows the calculated K_{d} values from the SPR measurements that are illustrated in FIG. 5. In addition, Table 5 shows the SPR data and calculated K_{d} values for BTX187269 (SEQ ID NO: 6) and Aptamer 4 (SEQ ID NO. 1).

TABLE 5
Calculated K_{D} values from SPR measurements

| Immobilized | | Conc | | K_{d} | Full | Full |
|---|---|---|---|---|---|---|
| aptamer | Analyte | (nM) | Response | (nM) | R² | Chi² |
| BTX176881 | EpCAM | 500 | 0.2434 | 8.40 | 0.989322 | 0.179008 |
| (SEQ ID | protein | 250 | 0.136 | 8.40 | 0.989322 | 0.179008 |
| No: 3) | | 100 | 0.0776 | 8.40 | 0.989322 | 0.179008 |
| BTX187269 | EpCAM | 500 | 0.2575 | 7.12 | 0.990323 | 0.215697 |
| (SEQ ID | protein | 250 | 0.1584 | 7.12 | 0.990323 | 0.215697 |
| NO: 6) | | 100 | 0.0551 | 7.12 | 0.990323 | 0.215697 |
| Aptamer 4 | EpCAM | 500 | 0.2742 | 10.10 | 0.986276 | 0.299279 |
| (SEQ ID | protein | 250 | 0.1618 | 10.10 | 0.986276 | 0.299279 |
| NO. 1) | | 100 | 0.0809 | 10.10 | 0.986276 | 0.299279 |

*K_{d}, R² and Chi² values by Global fitting for single reference method.

### Example 4: Motif Analysis

[0602] The process of Example 3 is followed to identity a high affinity aptamer to a target of interest. Once a high affinity aptamer is identified, its sequence is then analyzed using a software program to estimate its two-dimensional folding structure. Well-known sequence alignment programs and algorithms for motif identification can be used to identify sequence motifs and reduce the dimensionality of even large data sets of sequences. Further, software programs such as Vienna and mfold are well-known to those skilled in the art of aptamer selection and can be used to further group sequences based on secondary structure motifs (shared shapes). See FIG. 3A and FIG. 3B for example structure predictions. Shared secondary structure of course, does not guarantee identical three-dimensional structure. Therefore “wet-lab” validation of aptamers is still useful as no one set of in silico tools has yet been able to fully predict the optimal aptamer among a set of aptamer candidates.

### Example 5: Microvesicle-Based Aptamer Subtraction Assay

[0603] Circulating microvesicles are isolated from normal plasma (e.g., from individuals without cancer) using one of the following methods: 1) Isolation using the ExoQuick reagent according to manufacturer's protocol; 2) Ultracentrifugation comprising spin at 50,000 to 150,000 g for 1 to 20 hours then resuspending the pellet in PBS; 3) Isolation using the TEXIS reagent from Life Technologies according to manufacturer's protocol; and 4) filtration methodology. The filtration method is described in more detail as follows:

[0604] Place syringe and filter (1.2 μm Acrodisc Syringe Filter Versapor Membrane Non-Pyrogenic Ref: 4190, Pall Life Sciences) on open 7 ml 150K MWCO column (Pierce concentrators, 150K MWCO (molecular weight cut off) 7 ml. Part number: 89922). Fill open end of syringe with 5.2 ml of filtered 1×PBS prepared in sterile molecular grade water.

[0605] Pipette patient plasma (900-1000 μl) into the PBS in the syringe, pipette mix twice

[0606] Filter the plasma into the 7 ml 150K MWCO column.

[0607] Centrifuge 7 ml 150K MWCO columns at 2000×g at 20° C. (16° C. to 24° C.) for 1 hour.

[0608] After 1 hour spin, pour the flow-through into 10% bleach to be discarded.

[0609] Visually inspect sample volume. If plasma concentrate is above the 8.5 ml graduation on the concentrator tube, continue to spin plasma sample at 10 minute increments at 2000×g at 20° C. (16° C. to 24° C.) checking volume after each spin until plasma concentrate is between 8.0 and 8.5 mls.

[0610] Pipette mix slowly on the column a minimum of 6 times and adjust pipette to determine plasma concentrate volume. If volume is between 100 μl and Target Volume, transfer plasma concentrate to previously labeled co-polymer 1.5 ml tube. If volume is still greater than Target Volume, repeat the above centrifugation step.

[0611] Pour ˜45 mls of filtered 1×PBS prepared in sterile molecular grade water into 50 ml conical tube for use in the next step.

[0612] Add the appropriate amount of filtered 1×PBS to reconstitute the sample to the Target Volume.

[0613] The microvesicles produced using any of the isolation methods will comprise a mixture of vesicle types and will be various sizes with the possible exception of ultracentrifugation methods, which may favor isolating exosome size particles.

[0614] Randomly generated oligonucleotides (produced as described in Example 1 above) are incubated with the isolated normal vesicles in PBS overnight at room temperature or at 4 degrees Celsius.

[0615] The aptamers that do not bind to these vesicles are isolated by spinning down the vesicles at 50,000 to 150,000×g for 1 to 20 hours and collecting the supernatant.

[0616] The aptamer oligonucleotides are collected from the supernatant by running the mixture over a column containing streptavidin-coated beads. These aptamers are then added to vesicles isolated from diseased patients (using the same methods as above) and incubated overnight in PBS at room temperature or 4 degrees Celsius.

[0617] The vesicles are then spun at 50,000 to 150,000×g for 1 to 20 hours and the supernatant is discarded. The vesicles are resuspended in PBS and lysed using SDS or some similar detergent.

[0618] The aptamers are then captured by running the lysis mixture over a column of streptavidin-coated beads. The isolated aptamers are then subjected to a round of PCR to amplify the products.

[0619] The process is then repeated for a set number of times, e.g., 5 times. The remaining aptamer pool has been depleted of aptamers that recognize microvesicles found in “normal” plasma. Accordingly, this method can be used to enrich the pool in aptamers that recognize cancer vesicles. See FIG. 4.

### Example 6: Detection of Microvesicles Using Anti-EpCAM Aptamers

[0620] Aptamers can be used as binding agents to detect a biomarker. In this Example, aptamers are used as binding agents to detect EpCAM protein associated with microvesicles.

[0621] FIGS. 6A-D illustrate the use of an anti-EpCAM aptamer (Aptamer 4; SEQ ID NO. 1) to detect a microvesicle population in plasma samples. Plasma samples were obtained from three men with prostate cancer and three men without prostate cancer (referred to as controls or normals). Antibodies to the following microvesicle surface protein antigens of interest were conjugated to microbeads (Luminex Corp, Austin, Tex.): FIG. 6A) EGFR (epidermal growth factor receptor); FIG. 6B) PBP (prostatic binding protein; also known as PEBP1 (phosphatidylethanolamine binding protein 1)); FIG. 6C) EpCAM (epithelial cell adhesion molecule); and FIG. 6D) KLK2 (kallikrein-related peptidase 2). Microvesicles in the plasma samples were captured using the bead-conjugated antibodies. Fluorescently labeled Aptamer 4 was used as a detector in the microbead assay. FIGS. 6A-D show the average median fluorescence values (MFI values) detected for the bead-captured and Aptamer 4 detected microvesicles. Each plot individually shows the three cancer (C1-C3) and three normal samples (N1-N3). These data show that, on average, the prostate cancer samples have higher levels of microvesicles containing the target proteins than the normals.

### Example 7: Negative and Positive Selection of Aptamers

[0622] Aptamers can be used in various biological assays, including numerous types of assays which rely on a binding agent. For example, aptamers can be used instead of antibodies in immune-based assays. This Example provides an aptamer screening method that identifies aptamers that do not bind to any surfaces (substrates, tubes, filters, beads, other antigens, etc.) throughout the assay steps and bind specifically to an antigen of interest. The assay relies on negative selection to remove aptamers that bind non-target antigen components of the final assay. The negative selection is followed by positive selection to identify aptamers that bind the desired antigen.

[0623] Preliminary experiments were done with five DNA aptamer libraries with 10¹⁵ sequences each and variable lengths (60, 65, 70, 75, 80-mers) were pre-amplified and strand separated so that forward strand (non-biotinylated) serves as an aptamer. Multiple rounds of negative selection and positive selection were performed. Before each round, the recovered aptamer products were PCR amplified and strand separated using standard methodology. Selections were performed as follows:

[0624] Negative Selection

[0625] 1. Prepare bead negative Selection Mix: Incubate 1200 non-magnetic beads with standard blocking agent for 20 min.

[0626] 2. Add 50 μl of aptamer library (5 libraries total) to a PCR strip tube with 4.5 μl of each bead mixture. Incubate for 2 h at 37° C. with agitation at 550 rpm.

[0627] 3. Pre-wet filter plate (1.2 μm, Millipore) with PBS-BN buffer. Add 150 μl PBS-BN.

[0628] 4. Transfer samples from the PCR strip tubes to the filter plate, incubate for 1 h at room temperature with agitation at 550 rpm.

[0629] 5. Collect flow-through from filter plate into a collection (NBS) plate using a vacuum manifold.

[0630] 6. Concentrate and clean samples to remove excess materials as desired.

[0631] The negative selection process is repeated up to 6-7 times.

[0632] Positive Selection

[0633] Before starting, conjugate the protein biomarkers of interest (here, SSX4, SSX2, PBP, KLK2, SPDEF) to desired non-magnetic microbeads using conditions known in the art. The recombinant purified starting material included: SPDEF recombinant protein from Novus Biologicals (Littleton, Colo., USA), catalog number H00025803-P01; KLK2 recombinant protein from Novus, catalog number H00003817-P02; SSX2 recombinant protein from Novus, catalog number H00006757-P01; PBP recombinant protein from Fitzgerald Industries International (Action, MA, USA), catalog number 30R-1382; SSX4 recombinant protein from GenWay Biotech, Inc. (San Diego, Calif., USA), catalog number GWB-E219AC.

[0634] 1. Bead blocking: Incubate a desired number of each bead (8400×number of aptamer libraries (5)×an overage factor of (1.2)) with a starting block for 20 min.

[0635] 2. Mix 50 μl of each aptamer library sample to PCR strip tubes add 2.3 μl of bead sample with particular antigen. Incubate for 2 h at 37° C. with agitation at 550 rpm.

[0636] 3. Pre-wet filter plate (1.2 μm, Millipore) with PBS-BN buffer. Add 150 μl PBS-BN.

[0637] 4. Transfer samples from the PCR strip tubes to the filter plate, incubate for 1 h at room temperature with agitation at 550 rpm.

[0638] 5. Wash 3× with PBS-BN, add 50 μl of PBS and collect samples from the top of the filter to the 1.5 ml tubes.

[0639] The positive selection is repeated up to 16 times. Certain rounds of positive selection have additional steps to treat the recovered RNA (i.e., remaining aptamer candidates) as follows:

[0640] Round 8 of positive selection was modified as follows:

[0641] 1. After the third wash (PBS-BN) 25 μl of sample were collected from the top of the filter into 1.5 ml tubes.

[0642] 2. The filter plate was incubated at 45° C. for ˜10 min and washed immediately using vacuum. The plate was washed three more times with PBS-BN.

[0643] 3. 50 μl of PBS were added to the plate and step 2 was repeated.

[0644] 4. After the last wash, 25 μl of PBS was added to the wells. The samples were mixed well and collected from the top of the filter into 1.5 ml tubes.

[0645] Round 9 of positive selection was modified as follows:

[0646] 1. After the final wash in step 5), 5 μg/ml Streptavidin-PE was added to the aptamer mixture and incubated for 30 min at room temperature with agitation at 550 rpm.

[0647] 2. Samples on filter plate were washed 3× with PBS-BN (+additional 500 mM NaCl).

[0648] 3. One additional wash with regular PBS-BN was performed.

[0649] 4. 50 μl of PBS was added to the samples followed by collection as above into 1.5 ml tubes.

[0650] 5. Samples stored at −20° C.

[0651] Round 14 of positive selection was modified as follows:

[0652] Before start this round, the antigens of interest (SSX4, SSX2, PBP, KLK2, SPDEF) were conjugated to carboxylated magnetic beads using methods known in the art.

[0653] 1. Bead blocking: take desired number of each non-magnetic bead (3000× number of aptamer libraries (5)×an overage factor of 1.2), add starting block (3:1, blocking per 1200 beads), make 5 mixes of 4 antigens and supplement each with different target antigen conjugated to magnetic beads (see Table 6 below, wherein the antigens are conjugated to non-magnetic beads except as indicated), incubate 20 min.

TABLE 6
Bead blocking mixtures

| Blocking | | Magnetic bead |
|---|---|---|
| Mix | Non-magnetic bead antigens | antigens |
| 1 | SSX4 + PBP + KLK2 + SPDEF | SSX2 |
| 2 | SSX2 + PBP + KLK2 + SPDEF | SSX4 |
| 3 | SSX2 + SSX4 + KLK2 + SPDEF | PBP |
| 4 | SSX2 + SSX4 + PBP + SPDEF | KLK2 |
| 5 | SSX2 + SSX4 + PBP + KLK2 | SPDEF |

[0654] 2. Add 50 μl of aptamer libraries to PCR strip tubes, add bead mixtures with target antigen on magnetic beads to the tubes with pre-selected corresponding aptamer library and incubate for 2 h at 37° C. with agitation at 550 rpm.

[0655] 3. Pre-wet filter plate with PBS-BN buffer, add 150 μl PBS-BN.

[0656] 4. Transfer samples from PCR strip tubes to filter plate, incubate 1 h room temperature with agitation at 550 rpm.

[0657] 5. After last (standard) wash, add 5 μg/ml Streptavidin-PE, incubate for 30 min room temperature with agitation at 550 rpm;

[0658] 6. Wash 3× with PBS-BN (+additional 500 mM NaC).

[0659] 7. Perform one additional wash with regular PBS-BN.

[0660] 8. 50 μl of PBS was added to the samples followed by collection as above into 1.5 ml tubes.

[0661] 9. Remove the magnetic beads using a magnetic stand, and replace with fresh PBS buffer.

[0662] 10. Samples stored at −20° C. for subsequent DNA extraction and strand separation.

[0663] Optional steps implemented in the later round of positive selection are intended to increase stringency of aptamer binding (e.g., increased heat or salt concentration).

### Example 8: Discovery and Characterization of Anti-EpCAM Aptamers

[0664] In this Example, an aptamer to EpCAM identified using the technique in the Example above is characterized. After selection for a pool of EpCAM binding aptamers as described above, the aptamer library was sequenced using the Ion Torrent standard protocol (Life Technologies, Carlsbad, Calif.). Lead candidates were selected as those having (a) high abundant motifs across all read sequences with full expected length product and (b) strong secondary structure (FIG. 7B).

[0665] Aptamers were selected for EPCAM protein conjugated to MicroPlex beads in competition with SSX4, SSX2, PBP, KLK2, and SPDEF recombinant proteins. A portion of the aptamers was selected in initial rounds against EpCAM that was attached to an Fc tag, and after round 8 the selection was switched to EPCAM with a Histidine tag. Another portion of the aptamers was selected in initial rounds against EpCAM that was attached to a Histidine tag, and after round 8 the selection was switched to EPCAM with an Fc tag. Methods of using Fc and histidine tags for protein purification and capture are known to those of skill in the art.

[0666] Aptamer Characterization

[0667] CAR003 is an aptamer candidate identified using the above methodology. As an RNA aptamer, CAR003 with alternate tail sequence has the following RNA sequence (SEQ ID NO. 5):

[0668] 5′-auccagagug acgcagcagu cuuuucugau ggacacgugg uggucuagua ucacuaagcc accgugucca-3′

[0669] CAR003 was further characterized. EpCAM aptamer CAR003 is modified as desired by attachment of a biotin moiety on the 5′end or 3′ end. The biotin can be used to bind the aptamer using a streptavidin-biotin system, e.g., for labeling, capture and/or anchoring. FIG. 7B illustrates the optimal secondary structure of CAR003 with a minimum free energy (AG) of −30.00 kcal/mol. For purposes of illustration, the aptamer is shown as an RNA aptamer (SEQ ID NO. 5) corresponding to the CAR003 DNA sequence (SEQ ID NO. 4).

[0670] Synthesis and Purification.

[0671] The selected CAR003 aptamer was re-synthesized using AKTA OligoPilot 100 Synthesizer (GE Healthcare Life Sciences Corp., Piscataway, N.J.) with a 3′Biotin and final detritylation. The product was purified with anion exchange chromatography by FPLC. Several fractions after FPLC were combined as shown as the indicated Pools 1-3 in FIG. 7C. The figure comprises an FPLC chromatogram with all product and fractions assigned in pools after checking quality on gel. FIG. 7D illustrates a SYBR GOLD stained gel with different FPLC fractions of CAR003 aptamer after synthesis. Different fractions were combined in pools based on amount of unfinished chains in order high to low (pool 1-pool 3). The pools 1-3 correspond to those indicated in FIG. 7C.

[0672] CAR003 aptamer characterization. Purified CAR003 aptamer was tested for binding to recombinant EPCAM protein with a polyhistidine tag (“His tagged”) using the following internally developed assay. Anti-His tag conjugated beads were mixed with EPCAM-His tagged protein. The aptamer to be tested was labeled with streptavidin-phycoerythrin (SA-PE). The EpCAM-beads and SA-PE labeled aptamers were mixed. Binding was determined as median flourescent value in a bead assay as described herein. MFI values (FIG. 7E-F) increase with increased binding of the SA-PE labeled aptamer to the recombinant EpCAM. FIG. 7E-F illustrate binding of CAR003 to EPCAM protein in 25 mM HEPES with PBS-BN (PBS, 1% BSA, 0.05% Azide, pH 7.4) (FIG. 7E) or in 25 mM HEPES with 1 mM MgCl₂(FIG. 7F). EPCAM aptamer Aptamer 4 (see above) was used for comparison. As shown in the figures, CAR003 pool 3 more efficiently binds its target in the presence of MgCl₂(FIG. 7F) than in the presence of BSA (FIG. 7E).

[0673] To understand its performance further, CAR003 binding was tested in the presence of both BSA and MgCl₂ in various buffers. FIG. 7G illustrates CAR003 binding to EpCAM in the indicated salts with and without addition of bovine serum albumin (BSA). Again, CAR003 binding to EpCAM is more efficient when BSA is not present. Additionally, 150 mM NaCl was tested but did not appear to improve CAR003 performance over MgCl₂.

[0674] Another factor which might influence performance of aptamer is denaturing with different salt compositions. FIG. 7H illustrates the effect of denaturing on CAR003 binding to EPCAM protein. As seen from the chart, denaturing of the aptamer has a positive effect on CAR003 binding to EpCAM similar as the effect on CAR003 from MgCl₂. However, denaturing in the presence of MgCl₂ may not synergistically improve binding of CAR003 to EpCAM. Interestingly, CAR003 appeared more stable compared to control Aptamer 4 in the conditions tested.

[0675] CAR003 affinity to EpCAM in the bead assay environment was assessed in the same assay as above with aptamer titrated across a constant input of antigen. FIG. 7 illustrates titration of aptamers against EPCAM recombinant protein (constant input 5 μg). Under the conditions tested, Aptamer 4 had a higher affinity to EPCAM protein compared to CAR003 as suggested from saturation level starting at 5 μg of aptamer input.

[0676] In order to evaluate specificity of CAR003, it was tested using Western Blot against EPCAM recombinant protein, and controls comprising bovine serum albumin (BSA) and human serum albumin (HSA). FIG. 7J illustrates a Western blot with CAR003 aptamer versus EPCAM his-tagged protein, BSA, and HSA (5 μg each). The gel was blocked 0.5% F127 and probed with ˜50 μg/ml CAR003 biotinylated aptamer, fraction 3. The blot was visualized with NeutrAvidin-HRP followed by SuperSignal West Femto Chemiluminescent Substrate. The Western blot probed with CAR003 aptamer showed a clear preference of the aptamer to EPCAM protein over the albumins.

[0677] CAR003 Test with Plasma Samples.

[0678] Plasma samples from five prostate cancer and five normal subjects were tested with CAR003 to detect microvesicles using bead-conjugated proteins to capture the microvesicles and SA-PE labeled aptamer to detect the vesicles. SA-PE labeled Aptamer 4 detector was used as control. Fold changes of Cancer over Normal are shown in Table 7. The fold changes are shown without normalization (“Raw”) or with normalization to a negative control. The vesicles were captured with bead conjugated antibodies to SSX4, PBP, SPDEF, EPCAM, KLK2 and SSX2 as indicated.

TABLE 7
CAR003 to detect microvesicles

| | | SSX4 | PBP | SPDEF | EPCAM | KLK2 | SSX2 |
|---|---|---|---|---|---|---|---|
| Raw | Standard protocol | 0.87 | 0.39 | 0.71 | 0.63 | 0.93 | 0.87 |
| | Incubation in | 0.77 | 0.39 | 0.69 | 0.6 | 0.91 | 0.81 |
| | presence of 1 mM | | | | | | |
| | MgCl2 and absence | | | | | | |
| | of PBS-BN | | | | | | |
| | Aptamer 4 control | 0.78 | 0.67 | 0.81 | 0.72 | 1.19 | 0.79 |
| | (standard protocol) | | | | | | |
| Normalized | Standard protocol | 1.49 | 0.84 | 1.13 | 1.17 | 1.5 | 1.38 |
| to Negative | Incubation in | 1.27 | 0.83 | 1.08 | 1.1 | 1.46 | 1.29 |
| control | presence of 1 mM | | | | | | |
| | MgCl2 and absence | | | | | | |
| | of PBS-BN | | | | | | |
| | Aptamer 4 control | 1.18 | 0.96 | 1.11 | 1.04 | 1.82 | 1.1 |
| | (standard protocol) | | | | | | |

[0679] Under the conditions tested, the samples detected with CAR003 had lower MFI values as compared to detection with Aptamer 4, whereas CAR003 had a better signal-to-noise ratio and showed better separation between cancer and normal samples with SSX4, SPDEF, EPCAM and SSX2 capturing markers.

[0680] Control Aptamer

[0681] The characteristics of the aptamers (size, stability, binding affinity and specificity, etc) can be compared against control aptamers specific to EpCAM or other targets. For example, the aptamers are compared to the anti-VEGF aptamer 5′ biotin-CA ATT GGG CCC GTC CGT ATG GTG GGT (SEQ ID NO. 7) as described in Kaur and Yung, 2012.

### REFERENCES

[0682] 1) Miller, J., et al. “Selection of high affinity DNA-aptamer for activated protein C using capillary electrophoresis.” Research in Pharmaceutical Sciences 7.5 (2012): S987.
[0683] 2) Cerchia, L., and V. de Franciscis. “Nucleic Acid Aptamers Against Protein Kinases.” Current medicinal chemistry 18.27 (2011): 4152-4158.
[0684] 3) Wu, Jie, et al. “Identification, Characterization and Application of a G-Quadruplex Structured DNA Aptamer against Cancer Biomarker Protein Anterior Gradient Homolog 2.” PloS ONE 7.9 (2012): e46393
[0685] 4) Mitkevich, Olga V., et al. “DNA aptamers detecting generic amyloid epitopes.” Prion 6.4 (2012): 400-406.
[0686] 5) Kaur H, Yung L-Y L (2012) Probing High Affinity Sequences of DNA Aptamer against VEGF₁₆₅. PLoS ONE 7(2): e31196. doi:10.1371/journal.pone.0031196.

### Example 9: Aptamer Target Identification

[0687] In this Example, aptamers conjugated to microspheres are used to assist in determining the target of two aptamers identified by library screening methods as described above. The general approach is shown in FIG. 9. The approach is used to verify the targets of CAR003, an aptamer identified by library screening to recognize EpCAM. See description above for CAR003. In this approach, the sequence of CAR003 is randomly rearranged before linkage to the microspheres. The microspheres are used as controls to bind to targets that are similar but not identical to the intended target molecule.

[0688] The protocol used is as follows:

[0689] 1) The candidate aptamers (here, CAR003) and negative control aptamers (here, randomly arranged CAR003) are synthesized with modifications to allow capture (here, the aptamers are biotinylated) and crosslinking (here, using the Sulfo-SBED Biotin Label Transfer Reagent and Kit, Catalog Number 33073 from Thermo Fisher Scientific Inc., Rockford, Ill., to allow photocrosslinking).

[0690] 2) Each of the aptamers is individually mixed with microvesicles having the target of interest (here, BrCa cell line microvesicles).

[0691] 3) After incubation to allow the aptamers to bind target, ultraviolet light is applied to the mixtures to trigger crosslinking of the aptamers with the microvesicle targets.

[0692] 4) The microvesicles are lysed, thereby releasing the crosslinked aptamer-target complex into solution.

[0693] 5) The crosslinked aptamer-target complexes are captured from solution using a streptavidin coated substrate.

[0694] 6) The crosslinked aptamer-target complexes for each aptamer are run individually on SDS-PAGE gel electrophoresis. The captured protein targets are visualized with Coomasie Blue staining.

[0695] 7) The crosslinking and binding steps may be promiscuous so that multiple bands including the intended target but also random proteins will appear on each of the gels. The intended target will be found in a band that appears on the gel with the candidate aptamer (here, CAR003) but not the related negative control aptamers (here, randomly arranged CAR003). The bands corresponding to the target are excised from the gel.

[0696] 8) Mass spectrometry (MS) is used to identify the aptamer target from the excised bands.

### Example 10: Aptamers to Breast Cancer (BrCa) derived microvesicles

[0697] In this Example, an aptamer library is screened to identify aptamers that distinguish between microvesicles circulating in the blood of breast cancer patients and microvesicles circulating in the blood of healthy, control individuals (i.e., without breast cancer).

[0698] Microvesicles were isolated from plasma of a pool of 60 breast cancer patients (BrCa+). Microvesicles were also isolated from pool of 60 non-cancer samples (BrCa—). Microvesicles were isolated from the plasma using ultracentrifugation (120,000×g). Microvesicles were in the pellet from the ultracentrifugation. The supernatant from the ultracentrifugation was saved to use as a control. The microvesicles from both sample types were conjugated to MagPlex beads (Luminex Corp, Austin Tex.). Optionally, the isolated microvesicles are incubated with anti-HSA/IgG/Fibrinogen beads to remove these highly abundant blood proteins. However, the conjugation step can be optimized to favor conjugation of the microvesicles such that removal of highly abundant proteins may be less of an issue.

[0699] The aptamer library used consisted of a 2′F SUL1 RNA aptamer library. The sequence is 5′-GGGAGGACGAUGCGG-N40-CAGACGACUCGCUGAGGAUCCGAGA-3′ (SEQ ID NO. 8). The aptamer library consists of three sections: Forward primer—15 nucleotides, variable region—40 nucleotides; reverse primer—25 nucleotides. All pyrimidines (C and U) were 2′Fluoro modified.

[0700] The aptamer library was incubated with either the cancer or control microvesicle-conjugated beads. Thirteen rounds of positive selection for aptamers that bind the microvesicles were performed in parallel for both types of samples. See Example 11 below for detailed protocol of the positive selection steps. Negative selection was not performed.

[0701] A number of representative sequences obtained from these procedures are shown in Table 8. The sequences in the table were identified in the aptamer pools from selection against BrCa microvesicles but were not in the aptamer pools selected against non-cancer samples. In Table 8, the sequences are shown 5′ to 3′ from left to right, wherein each complete sequence consists of a 5′ leader sequence 5′-GGGAGGACGAUGCGG (SEQ ID NO. 9) followed by the indicated Variable Sequence followed by the 3′ tail sequence 5′-CAGACGACUCGCUGAGGAUCCGAGA (SEQ ID NO. 10). Each sequence is derived from a library having a leader and tail (see description above) with a variable sequence between. It is understood that the nucleotide sequences that are disclosed in Table 8 can also be modified to the extent that resulting modifications result in an aptamer having about 50, 55, 60, 65, 70, 75, 80, 85, 90, 95, 96, 97, 98, and 99 percent homology to the disclosed sequence and retain the functionality of binding to microvesicle antigens or functional fragments thereof.

TABLE 8
BrCa microvesicle aptamer
candidate sequences

| | SEQ | |
|---|---|---|
| | ID | |
| ID | NO. | Variable Sequence |
| B RCA_APT1 | 11 | CGCGUCUUCCCCGCAUUGCC |
| _RNA | | GCAAUUGCCAUACAUUAAUA |
| BRCA_APT2 | 13 | GUCCGGAACGCCUCGAUCCU |
| _RNA | | CGCAUAAUAUGAUACGUCUG |
| BRCA_APT3 | 15 | GUCCAUGGUACGCCUCGAUU |
| _RNA | | CCGCCCAUACAUGCAUGUAA |
| BRCA_APT4 | 17 | CACUAUCCGUUUGUCCGUCC |
| _RNA | | UCUUGUGGUAUUGCGCAUGC |
| BRCA_APT5 | 19 | UCUUCCAUCUGGUCGCGAUA |
| _RNA | | CAGAAUACGAUUAACAUAAA |
| BRCA_APT6 | 21 | GAUCACGCUGCCCUUUGUUU |
| _RNA | | AAGGCCUUUAUACAAACGCA |
| BRCA_APT7 | 23 | UAUUCGCCAGUCACAUCAAC |
| _RNA | | UAUGAUGACGCUUGACUGGA |

[0702] Each sequence in Table 8 is synthesized in two variants for further investigation: 5′ biotinylated and 3′ biotinylated. This provides aptamer variants that can be captured at the 5′ end or the 3′ end as desired. The aptamers are further synthesized with each pyrimidine (C and U) 2′Fluoro modified.

[0703] The DNA sequence corresponding to each RNA sequence in Table 8 is provided in the sequence listing, where the DNA sequence directly follows its corresponding RNA sequence. For example SEQ ID NO. 12 is the DNA sequence corresponding to RNA sequence SEQ ID NO. 11, etc. The DNA forms of the aptamers are synthesized for further characterization as well.

[0704] The aptamers above were identified using positive selection for aptamers which recognize BrCa and non-BrCa microvesicles conjugated to microspheres.

### Example 11: Aptamer library selection protocol

[0705] This Example provides the protocol for SUL1 RNA library selection performed in the Example above. The protocol can be followed for other aptamer libraries and sample input as desired.

[0706] Preparation

[0707] The working space is cleaned with 80% EtOH before working.

[0708] Beads are MagPlex beads (Luminex Corp., Austin, Tex.). Other beads can be substituted as desired.

[0709] Buffers/Reagents to Prepare:
[0710] MilliQ water
[0711] 100 mM MgCl₂
[0712] 5× Transcription Buffer (200 mM Tris pH 7.9)
[0713] 1×PBS
[0714] 1×PBS with 3 mM MgCl₂
[0715] 10×PBS
[0716] Selection buffer (1×PBS with 0.1% BSA and 3 mM MgCl₂)

[0717] Before starting with selection, remove the bead storage buffer, and wash beads with 1×PBS w/3 mM MgCl₂ 1 times (200 uL total in all 4 tubes). 200,000 beads per selection are used.

[0718] Binding 2′F SUL1 RNA Pool to Microvesicle Coated Magnetic Beads

[0719] Abbreviations: TK—Transcription; NTC—No template control.

[0720] Steps:
[0721] 1. 1^{st} Round: Mix 1 nmol purified 2′F SUL1 RNA with 20 μl of resuspended beads (conjugated with microvesicle). 10 uL of 10×PBS+1% BSA, 3 μl 100 mM MgCl₂, and 47 uL H₂O. This gives a final concentration of 1×PBS, 0.1% BSA, 3 mM MgCl₂.
   [0722] 1.1 The addition of MgCl₂ in this step gives a concentration of 3 mM MgCl₂. This is the binding concentration for the entire process.
   [0723] 1.2 Following Rounds: Mix 20 μl of transcription product (15 mM MgCl₂ inside) with 20 μl of washed microvesicle coated beads, plus 9 uL 10×PBS with 1% BSA, 51 uL H₂O. No additional MgCl₂ is needed because the MgCl₂ in the diluted transcription product (TK) provides a final concentration of 3 mM MgCl₂.
[0724] 2. Incubate for 30 min at 37° C., shake at 1000 rpm, and pipet mix every 10 minutes.
[0725] 3. Wash the beads:
   [0726] 3.1 One washing cycle comprises:
      [0727] 3.1.1 Remove the beads from the magnet
      [0728] 3.1.2 Resuspend beads in 100 μl×PBS+3 mM MgCl₂ off the magnet.
      [0729] 3.1.3 Incubate sample for 30 seconds off of the magnet.
      [0730] 3.1.4 Place the sample back onto the magnet, and wait until the beads are on the side.
      [0731] 3.1.5 Remove and discard the supernatant.
      [0732] 3.1.6 Resuspend in 100 μl 1×PBS+3 mM MgCl₂+0.1% BSA off of the magnet.
      [0733] 3.1.7 Incubate sample for 3 minutes off of the magnet.
      [0734] 3.1.8 Place the sample back onto the magnet, and wait until the beads are on the side.
      [0735] 3.1.9 Remove and discard the supernatant
   [0736] 3.2 1^{st} Round: Place bead mixture on a magnet and remove the supernatant. Wash once with 100 μl 1×PBS+3 mM MgCl₂+0.1% BSA (by pipette mixing the beads), and discard buffer.
   [0737] 3.3 Following Rounds: Increase the washing steps every second round by one more washing step up to 3 washing steps.
[0738] 4. Add 55 μl MilliQ water to the bead sample.
[0739] 5. Elute the RNA by incubating the bead sample for 5 min at 80° C.
   [0740] 5.1 Check if there is 50 μl, if not spin the sample down to spin down the condensed water off the top.
   [0741] 5.2 Transfer the supernatant to a new vial. Work quickly to avoid the strands rebinding the beads.
      [0742] 5.2.1 Use 50 μl eluate for the following RT-PCR and store the rest at −20° C.

[0743] RT-PCR of Recovered Aptamer Candidates

[0744] Tips
[0745] The rest of the RT-PCR sample and the TK-PCR sample is stored at −20° C.
[0746] RNA can be stored at 4° C. for ˜1 h
[0747] RT-PCR product can be stored overnight at 4° C.
[0748] Proceed to the next selection cycle for optimal RNA quality immediately after transcription.
[0749] Avoid vortexing RNA
[0750] Mix on ice
[0751] Use 0.5 ml PCR tubes
[0752] Every RT-PCR should have a no-template control (NTC) with water instead of template
[0753] Do not freeze-thaw DTT more than one time
[0754] 6. Prepare a Master Mix before the first round per Table 9, check it with 0.5 pmol RNA and store aliquots of 48 μl at −20° C. until usage.

TABLE 9
RT-PCR master mix

| | Volume (μl)/ | Final | |
|---|---|---|---|
| Reagent | reaction | concentration | |
| 5x Colorless GoTaq Flexi | 20 | 1x | |
| Buffer Promega cat# M890A | | | |
| 5 x first strand buffer | 4 | 0.2x | |
| (Invitrogen) lot# 1300427 | | | |
| 100 mM DTT | 2 | 2 | mM |
| 100 μM SUL1 F primer | 1 | 1 | μM |
| 100 μM SUL1 R primer | 1 | 1 | μM |
| 100 mM MgCl₂ | 1.5 | 1.5 | mM |
| 25 mM (each) dNTPs | 1.2 | 300 | μM |
| MilliQ water | 17.3 | | |
| Total | 48 | | |

[0755] 7. Add 50 μl MilliQ water as negative control (NTC) (pipette this first) or 50 μl selection eluate. Pipet mix.
[0756] 8. Incubate at 65° C. for 5 min.
[0757] 9. After cooling to 4° C., add:
   [0758] 9.1 1 μl Superscript II Reverse Transcriptase (Invitrogen, cat #18064) (200 U/μl)
   [0759] 9.2 1 μl GoTaqFlexi DNA polymerase (5 units/μl) Promega cat #M8305.

### PCR-Program (SARTPCR)

[0760] a) 10 min 54° C.
   [0761] (This step is only for reverse transcriptase, should more rounds be needed, do not repeat step A.)
[0762] b) 1 min 95° C.
[0763] c) 1 min 60° C.
[0764] d) 1 min 72° C.
[0765] 10. Cycle steps b-d for
   [0766] 10.1 1^{st} round b-d 4 cycles. Run 5 μL PCR products on a 4% agarose gel.
      [0767] 10.1.1 Subsequent rounds: The amount of RNA is decreased after the first round, leading to an increase in required PCR-cycles. To determine the number of cycles needed each time, check the band intensity from the agarose gel from the previous round of selection. Use that number of cycles to start the next round of RT-PCR. Note: Always check results on an agarose gel.
         [0768] 10.1.1.1 Agarose gel results: product band should be seen at the target length. The band intensity should be about the same as the 50 bp ladder band (if not a little less intense). If the band is not intense enough (barely visible), cycle an appropriate amount more and re-check on an agarose gel.

[0769] Transcription

[0770] All mixing performed on ice. Prepare transcription Master Mix per Table 10 and store aliquots of 85.7 μl at −20° C. until use.
[0771] 11. Verify pH of stock 200 mM Tris pH 7.9 before use. A change in pH over time may cause problems with the transcription.

TABLE 10
Transcription (TK) Master Mix for SUL1 library

| | Volume (μl) for | Volume (μl) for | Final |
|---|---|---|---|
| Reagent | one reaction | 20 reactions | concentration |
| 5x Transcription buffer | 20 | 400 | 1x |
| (200 mMTris, pH 7.9) | | | |
| 100 mM DTT | 5 | 100 | 5 mM |
| 100 mM ATP | 1 | 20 | 1 mM |
| 100 mM GTP | 1 | 20 | 1 mM |
| 100 mM 2′F-dUTP | 3 | 60 | 3 mM |
| 100 mM 2′F-dCTP | 3 | 60 | 3 mM |
| 100 mM MgCl₂ | 15 | 300 | 15 mM |
| MilliQ water | 37 | 740 | |
| Total volume | 85 | 1700 μl | |

[0772] 12. Add 10 μl RT-PCR product to the mastermix.
[0773] 13. Add 1 μl RNasin (40 units/μl)
   [0774] 13.1 Promega Recombinant RNasin Ribonuclease Inhibitor cat #N2515/N2511
[0775] 14. Add 4 μl T7 Y639F mutant polymerase (25 U/μl use: 100 U total per reaction)
[0776] 15. Perform the reaction for 30 min at 37° C.
[0777] 16. Use the transcription-product directly for the next selection round. If the next step is not feasible, freeze transcription product at −20 C.

[0778] Subsequent Rounds

[0779] Repeat the bead incubation, the RT-PCR and transcription as often as needed. Try to have similar band intensity of the RT-PCR product for the sample in all rounds as noted above.

[0780] Binding Assay

[0781] A binding assay is performed after desired rounds of selection to determine to assess non-specific binding of cancer selected aptamers to control beads (conjugated to supernatant from plasma ultracentrifugation, see above) and likewise for non-cancer control samples. Binding assays can also be performed to assess binding of selected aptamers against the intended target microvesicles.

[0782] Cherenkov protocol: Performed using ³²P radioactively labeled aptamer library.

[0783] Final concentration of selection buffer: 1×PBS+3 mM MgCl₂+0.01% BSA pH 7.4

[0784] Wash buffer: 1×PBS+3 mM MgCl₂ pH 7.4
[0785] 1. Remove microvesicle samples from −80° C. freezer and thaw.
[0786] 2. Place beads on magnet (200,000 per sample experiment), remove bead storage buffer.
[0787] 3. Wash 1×200 μL for 1 minute each with 1×PBS, 3 mM MgCl₂ buffer. Pool beads to make 200,000 in one tube.
[0788] 4. Resuspend beads in 70 μL of the selection buffer. (10 μl of 10×PBS, 1% BSA+3 μL 100 mM MgCl₂+57 μL H₂O per sample).
[0789] 5. Add 30 μL radioactively labeled RNA aptamer library to their respective sample.
[0790] 6. Incubate shaking at 1000 rpm at 37° C. for 30 min.
[0791] 7. Place samples on a magnet.
[0792] 8. Remove and save supernatant.
[0793] 9. Wash beads with 200 μL wash buffer 1×PBS 3 mM MgCl₂ pH 7.4, incubating off the magnet for 3 minute.
[0794] 10. Place samples on the magnet, remove and save wash solution.
[0795] 11. Repeat steps 9, 10.
[0796] 12. Add 100 μL water to the sample, pipette mix.
[0797] 13. Heat at 80° C. for 5 minutes.
[0798] 14. Place samples on a magnet, remove supernatant, and save.
[0799] 15. Resuspend beads in 100 μL water.
[0800] 16. Measure radioactivity of every fraction using scintillation counter.
[0801] 17. Analyze amount of background binding present.

[0802] Negative Selection

[0803] As desired, a negative selection step is added prior to incubating the aptamer library with the beads conjugated to the target microvesicles (i.e., procedure “Binding 2′F SUL1 RNA pool to microvesicle coated magnetic beads” above). The negative selection can be performed using beads conjugated to the supernatant or the input samples (e.g., plasma) after microvesicles are filtered or sedimented from the sample (referred to as “no microvesicle coated beads,” “microvesicle depleted samples,” or similar). The steps are:

[0804] 1) Start with aptamer library product from the desired round after transcription as described above. Wash the beads before start: remove storage buffer, wash beads with 200 μL wash buffer, then replace buffer as stated below:

[0805] 2) Negative selection step: Add and pipet mix 20 μl of transcription product (15 mM MgCl₂) with freshly washed ‘no microvesicle’ coated beads with 10 μL 10×PBS with 1% BSA, 70 μL H₂O. No additional MgCl₂ is needed because the MgCl₂ in the diluted transcription product (TK) provides a final concentration of 3 mM MgCl₂.

[0806] 3) Incubate for 30 min at 37° C., shake at 1000 rpm.

[0807] 4) Remove supernatant and add it to the positive selection beads (directly), which are washed microvesicle coated beads.

[0808] Continue with positive selection incubation. See Binding 2′F SUL1 RNA pool to microvesicle coated magnetic beads above, starting at step 2. Additional steps through transcription are as detailed above.

### Example 12: Additional Aptamers to Breast Cancer (BrCa) Derived Microvesicles

[0809] In this Example, an aptamer library is screened to identify aptamers that distinguish between microvesicles circulating in the blood of breast cancer patients and microvesicles circulating in the blood of healthy, control individuals (i.e., without breast cancer). The procedure used the same samples and aptamer library as in Example 10 above. The procedure in this Example differs in that negative selection was performed before each positive selection starting after the third round of positive selection.

[0810] Negative selection serves to remove aptamers that bind soluble/abundant/non-informative and common proteins for cancer and non-cancer proteins. Negative selection include performing negative selection on the aptamer candidates selected against BrCa+microvesicles as follows: (i) using microbeads conjugated to the supernatant from the BrCa+plasma ultracentrifugation step (which should not contain microvesicles); (ii) using microbeads conjugated to the supernatant from the BrCa-plasma ultracentrifugation step (which should not contain microvesicles); (iii) using microbeads conjugated to BrCa-microvesicles. Negative selection can also be performed on the aptamer candidates selected against BrCa-microvesicles as follows: (i) using microbeads conjugated to the supernatant from the BrCa+plasma ultracentrifugation step (which should not contain microvesicles); (ii) using microbeads conjugated to the supernatant from the BrCa-plasma ultracentrifugation step (which should not contain microvesicles); (iii) using microbeads conjugated to BrCa+microvesicles. Negative selection rounds are performed between rounds of positive selection as described herein.

[0811] Microvesicles were isolated from plasma of a pool of 60 breast cancer patients (BrCa+). Microvesicles were also isolated from pool of 60 non-cancer samples (BrCa—). Microvesicles were isolated from the plasma using ultracentrifugation (120,000×g). Microvesicles were in the pellet from the ultracentrifugation. The supernatant from the ultracentrifugation was saved to use as a control. The microvesicles from both sample types were conjugated to MagPlex beads (Luminex Corp, Austin Tex.).

[0812] The aptamer library used consisted of a 2′F SUL1 RNA aptamer library. The sequence is 5′-GGGAGGACGAUGCGG-N40-CAGACGACUCGCUGAGGAUCCGAGA-3′ (SEQ ID NO. 8). The aptamer library consists of three sections: Forward primer—15 nucleotides, variable region—40 nucleotides; reverse primer—25 nucleotides. All pyrimidines (C and U) were 2′Fluoro modified.

[0813] The aptamer library was incubated with either the cancer or control microvesicle-conjugated beads. Nine rounds of positive selection for aptamers that bind the microvesicles were performed in parallel for both types of samples. Negative selection against beads conjugated to the input plasma supernatant after ultracentrifugation before positive selection in rounds 4-9. See Example 11 above for detailed protocol of the positive selection and negative selection steps.

[0814] The aptamers that were retained from the above positive selection were sequenced using Next Generation sequencing technology consisting of Ion Torrent NGS (Life Technologies, Inc., Carlsbad, Calif.). The MiSeq system may be used also (Illumina, Inc., San Diego, Calif.). The sequences are compared to identify aptamers that are found in the cancer samples and not the control samples, and vice versa. Such aptamers provide candidates that can be used to distinguish between BrCa and non-BrCa samples.

[0815] The sequencing data was analyzed according to the following procedure:

[0816] Step 1: Sequences were ranked according to frequencies in entire aptamer pool recovered in round 9 after negative selection against beads conjugated to microvesicle-depleted cancer plasma followed by positive selection against beads conjugated to cancer microvesicles.

[0817] Step 2: Fold changes were calculated between noted sample in Step 1 and: (i) same sample after additional negative selection against microvesicle depleted cancer plasma; (ii) same sample after additional negative selection against non-cancer microvesicles; (iii) same sample after additional negative selection against microvesicles depleted non-cancer plasma.

[0818] Step 3: Sequences were ranked based on fold changes calculated in Step 2 to identify sequences which are abundant or deficient in aptamer pool selected for breast cancer derived microvesicles.

[0819] Step 4: Possible mutant sequences (e.g., due to PCR or other errors) were removed based on results of consolidation analysis.

[0820] Step 5: Sequences were identified with fold changes greater than 3 and minimum frequency 50 in all three variants (i, ii and iii in step 2).

[0821] The same selection schemes as in steps 1-5 were performed for aptamers selected against beads conjugated to non-cancer microvesicles.

[0822] A number of representative sequences obtained from these procedures are shown in Table 11. The sequences in the table were identified in the aptamer pools from selection against BrCa microvesicles but were not in the aptamer pools selected against non-cancer samples. In Table 11, the sequences are shown 5′ to 3′ from left to right, wherein each complete sequence consists of a 5′ leader sequence 5′-GGGAGGACGAUGCGG (SEQ ID NO. 9) followed by the indicated Variable Sequence followed by the 3′ tail sequence 5′-CAGACGACUCGCUGAGGAUCCGAGA (SEQ ID NO. 10). Each sequence is derived from a library having a leader and tail (see description above) with a variable sequence between. It is understood that the nucleotide sequences that are disclosed in Table 11 can also be modified to the extent that resulting modifications result in an aptamer having about 50, 55, 60, 65, 70, 75, 80, 85, 90, 95, 96, 97, 98, and 99 percent homology to the disclosed sequence and retain the functionality of binding to microvesicle antigens or functional fragments thereof.

TABLE 11
BrCa microvesicle aptamer candidate sequences

| | SEQ | |
|---|---|---|
| ID | ID | |
| (Figure) | NO. | Variable Sequence |
| BCE8 | 25 | UACCGCCUCAUCAUCGGACACGACGUGUAUCAGUUGGCUG |
| (FIG. 10Ai) | | |
| BCE9 | 26 | GUUCUCGCCUCUGUCCUCAUGGUUCGAACCGGUAUGCAUG |
| (FIG. 10Aii) | | |
| BCE 10 | 27 | GCGGUUUCUUCUCCUGACUACAUGAGAUUAAUAAACGCGC |
| (FIG. 10Aiii) | | |
| BCE 11 | 28 | CCGCCUCGAACACUGACGUCGUGGAACCUUCGAUUGCUAG |
| (FIG. 10Aiv) | | |
| BCE 12 | 29 | AAUCACAGUAAUUCUGCCCCUCUGAUGAAACCGGUUACUU |
| (FIG. 10Av) | | |
| BCE 13 | 30 | CUUAGUGAUUUCGCCGCCCCUCUGUUUAGUGGCCAUUGGA |
| (FIG. 10Avi) | | |
| BCE 14 | 31 | ACACUAUUCCGGUAAGUCAUCGUUUAACCGUUUGUUGCAA |
| (FIG. 10Avii) | | |
| BCE 15 | 32 | UGCGCAACGCCUUGAUUCACUCCUACAGUGUGUCUAUAGA |
| (FIG. 10Aviii) | | |
| BCE 16 | 33 | AAUGUUAAGCUUACAUACGCCUGGGUCACUCUUUGUUCUG |
| (FIG. 10Aix) | | |
| BCE 17 | 34 | GUAAAUAUUCACGUUGAAUCGCCUUGCUCCUCUUAGUCUG |
| (FIG. 10Bi) | | |
| BCE 18 | 35 | CCGCCUCGGAUCGUUCCCAAUGGUGGUACCCCUAUUAAUG |
| (FIG. 10Bii) | | |
| BCE 19 | 36 | UGUAGAUCGUUCUUAUCCGCCUCGGUCUUCCCCAGGUUAA |
| (FIG. 10Biii) | | |
| BCE20 | 37 | AUCGUCGGGCCCCUUUUAUGAAACUUACAUGAAAGCGCAC |
| (FIG. 10Biv) | | |
| BCE21 | 38 | UAAGAGUGCACAGUACUGCCUCGAUCCUCCAUGGCUUAAG |
| (FIG.10Bv) | | |
| BCE22 | 39 | GAAUUAGUACUGACGGCCGCCUUGAUCCUCCGUUAGUCUG |
| (FIG. 10Bvi) | | |
| BCE23 | 40 | GCCCGCCUCCGAAGCCCUCCUAAGUGCACUUUAAACCGCG |
| (FIG. 10Bvii) | | |
| BCE24 | 41 | CCGCCUGGGAUCACUCUCUACGCGUAUAAAUGCUCUGUCA |
| (FIG. 10Bviii) | | |
| BCE25 | 42 | AGUCUGACCCUGUUAUGGACUACCAUAUCAGAAAGGUACU |
| (FIG. 10Bix) | | |
| BCE26 | 43 | GGUGAUCCUCCCCCCCGCCUCGAAGAUUUGUGCACAUAUC |
| (FIG. 10Ci) | | |
| BCE27 | 44 | GCUACCAUCGUCUAGUGAGUCACCCUUAGUUCAUCAAGGC |
| (FIG. 10Cii) | | |

[0823] Each sequence in Table 11 is synthesized in two variants for further investigation: 5′ biotinylated and 3′ biotinylated. This provides aptamer variants that can be captured at the 5′ end or the 3′ end as desired. The aptamers are further synthesized with each pyrimidine (C and U) 2′Fluoro modified. The aptamers may also be synthesized as the DNA sequence corresponding to each RNA sequence in Table 11. The aptamer libraries can also be filtered based on predicted secondary sequence, free energy, and other parameters as described herein.

[0824] FIGS. 10A-C show binding of the aptamers in Table 11 against microbeads conjugated to various input samples. The aptamer is indicated above each plot and the plot for each aptamer is indicated in the ID column in Table 11. The input sample is indicated on the X axis from left to right as follows: 1) Cancer Exosome: aptamer binding to microbeads conjugated to microvesicles isolated from plasma samples from breast cancer patients; 2) Cancer Non-exosome: aptamer binding to microbeads conjugated to plasma samples from breast cancer patients after removal of microvesicles by ultracentrifugation; 3) Non-Cancer Exosome: aptamer binding to microbeads conjugated to microvesicles isolated from plasma samples from normal (i.e., non-breast cancer) patients; 4) Non-Cancer Non-Exosome: aptamer binding to microbeads conjugated to plasma samples from breast cancer patients after removal of microvesicles by ultracentrifugation. As shown in FIGS. 10A-C, the aptamers were each able to distinguish between the cancer microvesicle samples versus the supernatant control samples and the non-cancer microvesicles. Further, all sequences in Table 11 were observed as binding more abundantly to cancer derived microvesicles as compared to non-cancer derived microvesicles with the exception of BCE10 and BCE14, which were observed as binding more abundantly to non-cancer derived microvesicles as compared to cancer derived microvesicles.

[0825] Based on the comparisons performed in this Example, aptamers that bind different starting input are obtained, including: 1) aptamers that preferentially bind cancer-derived microvesicles over non-cancer derived microvesicles; 2) aptamers that preferentially bind non-cancer-derived microvesicles over cancer derived microvesicles; 3) aptamers that bind both non-cancer-derived microvesicles and cancer derived microvesicles (e.g., “universal” binders); and 4) aptamers that bind plasma components that have been depleted of microvesicles.

[0826] The aptamer libraries in this Example are further subjected to four rounds of additional negative and positive selection. The positive selection is performed as described in this Example. The negative selection rounds are performed using the beads conjugated to non-cancer microvesicles as negative selection for aptamers obtained by positive selection against beads conjugated to cancer microvesicles. Similarly, the negative selection rounds are performed using the beads conjugated to cancer microvesicles as negative selection for aptamers obtained by positive selection against beads conjugated to non-cancer microvesicles.

### Example 13: Disease Diagnosis

[0827] This example illustrates the use of oligonucleotide probes of the present invention to diagnose a proliferative disease.

[0828] A suitable quantity of an oligonucleotide or pool of oligonucleotides that bind a BrCa-derived population of microvesicles, such as identified in Example 10 or Example 12 or various Examples below, is synthesized via chemical means known in the art. The oligonucleotides are conjugated to a diagnostic agent suitable for detection, such as a fluorescent moiety, using a conjugation method known in the art.

[0829] The composition is applied to microvesicles isolated from blood samples taken from a test cohort of patients suffering from a proliferative disease associated with the overexpression of microvesicles, e.g. breast cancer. The composition is likewise applied to microvesicles isolated from blood samples taken from a negative control cohort, not suffering from a proliferative disease.

[0830] The use of appropriate detection techniques (e.g., microbead assay or flow cytometry) on the test cohort samples indicates the presence of disease, while the same techniques applied to the control cohort samples indicate the absence of disease.

[0831] The results show that the oligonucleotides of the present invention are useful in diagnosing proliferative diseases.

### Example 14: Theranostics

[0832] This example illustrates the use of oligonucleotide probes of the present invention to provide a theranosis for a drug for treating a proliferative disease.

[0833] A suitable quantity of an oligonucleotide or pool of oligonucleotides that bind a BrCa-derived population of microvesicles, such as identified in Example 10 or Example 12 or various Examples below, is synthesized via chemical means known in the art. The probes are conjugated to an agent suitable for detection, such as a fluorescent moiety, using a method known in the art such as conjugation. The oligonucleotide probe or panel of oligonucleotide probes are within a suitable composition, such as a buffered solution.

[0834] Treatment Selection.

[0835] The composition is applied to microvesicles isolated from blood samples taken from a test cohort of patients suffering from a proliferative disease, e.g. breast cancer, that responded to a certain treatment, e.g., trautuzamab. The composition is likewise applied to microvesicles isolated from blood samples taken from a control cohort consisting of patients suffering from the same proliferative disease that did not respond to the treatment. The use of appropriate detection techniques (e.g., microbead assay or flow cytometry) on the test cohort samples indicates that probes which bind the samples are useful for identifying patients that will respond to the treatment, while the same techniques applied to the control cohort samples identifies probes useful for identifying patients that will not respond to the treatment.

[0836] Treatment Monitoring.

[0837] In another setting, the composition is applied to microvesicles isolated from blood samples taken from a test cohort of patients suffering from a proliferative disease, e.g. breast cancer, prior to or during a course of treatment, such as surgery, radiotherapy and/or chemotherapy. The composition is then applied to microvesicles isolated from blood samples taken from the patients over a time course. The use of appropriate detection techniques (e.g., microbead assay or flow cytometry) on the test cohort samples indicates whether the detected population of disease-related microvesicles increases, decreases, or remains steady in concentration over time during the course of treatment. An increase in the population of disease-related microvesicles post-treatment may indicate that the treatment is ineffective whereas a decrease in the population of disease-related microvesicles post-treatment may indicate that the treatment has a beneficial effect.

[0838] The results show that the oligonucleotide probes of the present invention are useful in theranosing proliferative diseases.

### Example 15: Therapeutic Oligonucleotide Probes

[0839] This example illustrates the use of oligonucleotide probes of the present invention to treat a proliferative disease.

[0840] A suitable quantity of an oligonucleotide or pool of oligonucleotides that bind a BrCa-derived population of microvesicles, such as identified in Example 10 or Example 12 or various Examples below, is synthesized via chemical means known in the art. The oligonucleotides are conjugated to a chemotherapeutic agent, such as Doxil, using a conjugation method known in the art. The conjugate is formulated in an aqueous composition.

[0841] The composition is administered intravenously, in one or more doses, to a test cohort of mice suffering from a proliferative disease associated with the overexpression of the microvesicles, e.g. a breast cancer model. A control cohort, not suffering from a proliferative disease is administered the identical composition intravenously, according to a corresponding dosage regimen.

[0842] Pathological analysis of tumor samples and/or mouse survival indicates that mortality and/or morbidity are improved in the test cohort over the control cohort.

[0843] The results show that the oligonucleotides of the present invention are useful in treating proliferative diseases.

[0844] Useful oligonucleotides can be used to treat proliferative diseases in other organisms, e.g., a human.

### Example 16: Oligonucleotide—Sequencing Detection Method

[0845] This example illustrates the use of an oligonucleotide pool to detect microvesicles that are indicative of a phenotype of interest. The method makes use of a pool of oligonucleotides that have been enriched against a target of interest that is indicative of a phenotype of interest. The method in this Example allows efficient use of a library of oligonucleotides to preferentially recognize a target entity.

[0846] For purposes of illustration, the method is described in the Example with a microvesicle target from a bodily fluid sample. One of skill will appreciate that the method can be extended to other types of target entity (e.g., cells, proteins, various other biological complexes), sample (e.g., tissue, cell culture, biopsy, other bodily fluids) and other phenotypes (other cancers, other diseases, etc) by enriching an aptamer library against the desired input samples.

[0847] General Workflow:

[0848] 1) Obtain sample (plasma, serum, urine or any other biological sample) of patients with unknown medical etymology and pre-treating them accordingly to ensure availability of the target of interest (see below). Where the target of interest is a microvesicle population, the microvesicles can be isolated and optionally tethered to a solid support such as a microbead.

[0849] 2) Expose pre-treated sample to an oligonucleotide pool carrying certain specificity against target of interest. As described herein, an oligonucleotide pool carrying certain specificity against the target of interest can be enriched using various selection schemes, e.g., using non-cancer microvesicles for negative selection and cancer microvesicles for positive selection as described above. DNA or RNA oligonucleotides can be used as desired.

[0850] 3) Contact oligonucleotide library with the sample.

[0851] 4) Elute any oligonucleotides bound to the target.

[0852] 5) Sequence the eluted oligonucleotides. Next generation sequencing methods can be used.

[0853] 6) Analyze oligonucleotide profile from the sequencing. A profile of oligonucleotides known to bind the target of interest indicates the presence of the target within the input sample. The profile can be used to characterize the sample, e.g., as cancer or non-cancer.

[0854] Protocol Variations:

[0855] Various configurations of the assay can be performed. Four exemplary protocols are presented for the purposes of the oligonucleotide-sequencing assay. Samples can be any appropriate biological sample. The protocols can be modified as desired. For example, the microvesicles can be isolated using alternate techniques instead or or in addition to ultracentrifugation. Such techniques can be disclosed herein, e.g., polymer precipitation (e.g., PEG), column chromatography, and/or affinity isolation.

[0856] Protocol 1:

[0857] Ultracentrifugation of 1-5 ml bodily fluid samples (e.g., plasma/serum/urine) (120K×g, no sucrose) with two washes of the precipitate to isolate microvesicles.

[0858] Measure total protein concentration of recovered sample containing the isolated microvesicles.

[0859] Conjugate the isolated microvesicles to magnetic beads (for example MagPlex beads (Luminex Corp. Austin Tex.)).

[0860] Incubate conjugated microvesicles with oligonucleotide pool of interest.

[0861] Wash unbound oligonucleotides by retaining beads using magnet.

[0862] Elute oligonucleotides bound to the microvesicles.

[0863] Amplify and purify the eluted oligonucleotides.

[0864] Oligonucleotide sequencing (for example, Next generation methods; Ion Torrent: fusion PCR, emulsion PCR, sequencing).

[0865] Assess oligonucleotide profile.

[0866] Protocol 2:

[0867] This alternate protocol does not include a microvesicle isolation step, microvesicles conjugation to the beads, or separate partitioning step. This may present non-specific binding of the oligonucleotides against the input sample.

[0868] Remove cells/debris from bodily fluid sample and dilute sample with PBS containing MgCl₂ (2 mM).

[0869] Pre-mix sample prepared above with oligonucleotide library.

[0870] Ultracentrifugation of oligonucleotide/sample mixture (120K×g, no sucrose). Wash precipitated microvesicles.

[0871] Recover precipitate and elute oligonucleotides bound to microvesicles.

[0872] Amplify and purify the eluted oligonucleotides.

[0873] Oligonucleotide sequencing (for example, Next generation methods; Ion Torrent: fusion PCR, emulsion PCR, sequencing).

[0874] Assess oligonucleotide profile.

[0875] Protocol 3:

[0876] This protocol uses filtration instead of ultracentrifugation and should require less time and sample volume.

[0877] Remove cells/debris from bodily fluid sample and dilute it with PBS containing MgCl₂ (2 mM).

[0878] Pre-mix sample prepared above with oligonucleotide library.

[0879] Load sample into filter (i.e., 150K or 300K MWCO filter or any other that can eliminate unbound or unwanted oligonucleotides). Centrifuge sample to concentrate. Concentrated sample should contain microvesicles.

[0880] Wash concentrate. Variant 1: Dilute concentrate with buffer specified above to the original volume and repeat centrifugation. Variant 2: Dilute concentrate with buffer specified above to the original volume and transfer concentrate to new filter unit and centrifuge. Repeat twice.

[0881] Recover concentrate and elute oligonucleotides bound to microvesicles.

[0882] Amplify and purify the eluted oligonucleotides.

[0883] Oligonucleotide sequencing (for example, Next generation methods; Ion Torrent: fusion PCR, emulsion PCR, sequencing).

[0884] Assess oligonucleotide profile.

[0885] Protocol 4:

[0886] Ultracentrifugation of 1-5 ml bodily fluid sample (120K×g, no sucrose) with 2 washes of the precipitate to isolate microvesicles.

[0887] Pre-mix microvesicles with oligonucleotide pool.

[0888] Load sample into 300K MWCO filter unite and centrifuge (2000×g). Concentration rate is ˜3×.

[0889] Wash concentrate. Variant 1: Dilute concentrate with buffer specified above to the original volume and centrifuge. Repeat twice. Variant 2: Dilute concentrate with buffer specified above to the original volume and transfer concentrate to new filter unit and centrifuge. Repeat twice

[0890] Recover concentrate and elute oligonucleotides bound to microvesicles.

[0891] Amplify and purify the eluted oligonucleotides.

[0892] Oligonucleotide sequencing (for example, Next generation methods; Ion Torrent: fusion PCR, emulsion PCR, sequencing).

[0893] Assess oligonucleotide profile.

[0894] In alterations of the above protocols, polymer precipitation is used to isolate microvesicles from the patient samples. For example, the oligonucleotides are added to the sample and then PEG4000 or PEG8000 at 4% or 8% concentration is used to precipitate and thereby isolate microvesicles. Elution, recovery and sequence analysis continues as above.

### Example 17: Plasma/Serum probing with an Oligonucleotide Probe Library

[0895] The following protocol is used to probe a plasma or serum sample using an oligonucleotide probe library.

[0896] Input Oligonucleotide Library:

[0897] Use 2 ng input of oligonucleotide library per sample.

[0898] Input oligonucleotide library is a mixture of two libraries, cancer and non-cancer enriched, concentration is 16.3 ng/ul.

[0899] Dilute to 0.2 ng/ul working stock using Aptamer Buffer (3 mM MgCl₂ in 1×PBS)

[0900] Add 10 ul from working stock (equal to 2 ng library) to each optiseal tube

[0901] Materials:

[0902] PBS, Hyclone SH30256.01, LN: AYG165629, bottle #8237, exp. 7/2015

[0903] Round Bottom Centrifuge Tubes, Beckman 326820, LN:P91207

[0904] OptiSeal Centrifuge tubes and plugs, polyallomer Konical, Beckman 361621, lot #Z10804SCA

[0905] Ultracentrifuge rotor: 50.4 TI

[0906] Ultracentrifuge rotor: 50.4 TI, Beckman Caris ID #0478

[0907] Protocol:

[0908] 1 Pre-chill tabletop centrifuge, ultracentrifuge, buckets, and rotor at 4° C.

[0909] 2 Thaw plasma or serum samples

[0910] 3 Dilute 1 ml of samples with 1:2 with Aptamer Buffer (3 mM MgCl₂ in 1×PBS)

[0911] 4 Spin at 2000×g, 30 min, 4° C. to remove debris (tabletop centrifuge)

[0912] 5 Transfer supernatants for all samples to a round bottom conical

[0913] 6 Spin at 12,000×g, 45 min, 4° C. in ultracentrifuge to remove additional debris.

[0914] 7 Transfer supernatant about 1.8 ml for all samples into new OptiSeal bell top tubes (uniquely marked).

[0915] 8 Add 2 ng (in 10 ul) of DNA Probing library to each optiseal tube

[0916] 9 QS to 4.5 ml with Aptamer Buffer

[0917] 10 Fix caps onto the OptiSeal bell top tubes

[0918] 11 Apply Parafilm around caps to prevent leakage

[0919] 12 Incubate plasma and oligonucleotide probe library for 1 hour at room temperature with rotation

[0920] 13 Remove parafilm (but not caps)

[0921] 14 Place correct spacer on top of each plugged tube

[0922] 15 Mark pellet area on the tubes, insure this marking is facing outwards from center.

[0923] 16 Spin tubes at 120,000×g, 2 hr, 4° C. (inner row, 33,400 rpm) to pellet microvesicles.

[0924] 17 Check marking is still pointed away from center.

[0925] 18 Completely remove supernatant from pellet, by collecting liquid from opposite side of pellet marker and using a 10 ml syringe barrel and 21G2 needle

[0926] 19 Discard supernatant in appropriate biohazard waste container

[0927] 20 Add 1 ml of 3 mM MgCl2 diluted with 1×PBS

[0928] 21 Gentle vortex, 1600 rpm for 5 sec and incubate 5 min at RT.

[0929] 22 QS to ˜4.5 mL with 3 mM Mg C12 diluted with 1×PBS

[0930] 23 Fix caps onto the OptiSeal bell top tubes.

[0931] 24 Place correct spacer on top of each plugged tube.

[0932] 25 Mark pellet area on the tubes, insure this marking is facing outwards from center.

[0933] 26 Spin tubes at 120,000×g, 70 min, 4° C. (inner row 33,400 rpm) to pellet microvesicles

[0934] 27 Check marking in still pointed away from center.

[0935] 28 Completely remove supernatant from pellet, by collecting liquid from opposite side of pellet marker and using a 10 ml syringe barrel and 21G2 needle

[0936] 29 Discard supernatant in appropriate biohazard waste container

[0937] 30 Add 1 ml of 3 mM MgCl2 diluted with 1×PBS

[0938] 31 Gentle vortex, 1600 rpm for 5 sec and incubate 5 min at RT.

[0939] 32 QS to ˜4.5 mL with 3 mM Mg C12 diluted with 1×PBS

[0940] 33 Fix caps onto the OptiSeal bell top tubes.

[0941] 34 Place correct spacer on top of each plugged tube.

[0942] 35 Mark pellet area on the tubes, insure this marking is facing outwards from center.

[0943] 36 Spin tubes at 120,000×g, 70 min, 4° C. (inner row 33,400 rpm) to pellet microvesicles

[0944] 37 Check marking is still pointed away from center.

[0945] 38 Save an aliquot of the supernatant (100 ul into a 1.5 ml tube)

[0946] 39 Completely remove supernatant from pellet, by collecting liquid from opposite side of pellet marker and using a 10 ml syringe barrel and 21G2 needle

[0947] 40 Add 50 ul of Rnase-free water to the side of the pellet

[0948] 41 Leave for 15 min incubation on bench top

[0949] 42 Cut top off tubes using clean scissors.

[0950] 43 Resuspend pellet, pipette up and down on the pellet side

[0951] 44 Measure the volume, make a note on the volume in order to normalize all samples

[0952] 45 Transfer the measured resuspended eluted microvesicles with bound oligonucleotides to a Rnase free 1.5 ml Eppendorf tube

[0953] 46 Normalize all samples to 100 ul to keep it even across samples and between experiments.

[0954] Next Generation Sequencing Sample Preparation:

[0955] I) Use 50 ul of sample from above, resuspended in 100 ul H2O and containing microvesicle/oligo complexes, as template in Transposon PCR, 14 cycles.

[0956] II) AMPure transposon PCR product, use entire recovery for indexing PCR, 10 cycles.

[0957] III) Check indexing PCR product on gel, proceed with AMPure if band is visible. Add 3 cylces if band is invisible, check on gel. After purification quantify product with QuBit and proceed with denaturing and diluting for loading on HiSeq flow cell (Illumina Inc., San Diego, Calif.).

[0958] IV) 5 samples will be multiplexed per one flow cell. 10 samples per HiSeq.

### Example 18: Enrichment of Oligonucleotides to Breast Cancer (BrCa) and Non-BrCa Derived Microvesicles

[0959] In this Example, a naïve oligonucleotide probe library is screened to enrich oligonucleotides that identify microvesicles circulating in the blood of breast cancer patients and microvesicles circulating in the blood of healthy, control individuals (i.e., without breast cancer). The procedure in this Example used the 9-round selection scheme shown in FIG. 11A.

[0960] In FIGS. 11A-11B, the following abbreviations are used: CE—Cancer exosome samples; NCE—Non-cancer exosome samples; CNE—Cancer no exosome samples; NCNE—Non-cancer no exosome samples; MFI—Median Fluorescence Intensity; GC—GC content group analysis; Heat—heat elution; NaOH— sodium hydroxide elution. The terms exosome and microvesicle are used interchangeably.

[0961] As indicated in FIG. 11A, 0.1 mg/mL salmon sperm DNA was added as a competitor in selection rounds 7-9. FIG. 11B shows the enrichment of aptamers that bind to microvesicles (CE and NCE). Binding was determined by fluorescently labeling aptamer candidates and detecting binding to bead-capture microvesicles using a microbead assay format. At the end of round 9, only aptamers having GC content between ˜30% and 70% were selected to generate panels to differentiate cancer and non-cancer samples. In addition, several groups of aptamers were selected using the following criteria: 1) 12 most commonly observed; 2) 12 most commonly observed having >2-fold change in binding observed between cancer and normal samples; 3) 30 most commonly observed having >2-fold change in binding observed between cancer and normal samples, >10 read counts in the library determined by high throughput sequencing, heat elution after selection round 9; and 4) 30 most commonly observed having >2-fold change in binding observed between cancer and normal samples, >10 read counts in the library determined by high throughput sequencing, NaOH elution after selection round 9.

[0962] Retained sequences are shown in Table 12 with selection criteria 1-4 indicated. In Table 12, the sequences are shown 5′ to 3′ from left to right, wherein each complete sequence consists of a 5′ leader sequence 5′-GCTGTGTGACTCCTGCAA (SEQ ID NO. 45) followed by the indicated Variable Sequence followed by the 3′ tail sequence 5′-GCAGCTGTATCTTGTCTCC (SEQ ID NO. 46).

TABLE 12
BrCa microvesicle oligonucleotide sequences

| SEQ ID | Selection | |
|---|---|---|
| NO. | Criteria | Variable Sequence |
| 47 | 3 | GTCCGCTTGGGGGTGGGTATCGAAAATTCGCGTTCTGGGGCGG |
| 48 | 3 | CTTCGCTCGTTTCAATGTTCAGTTCTGGTCTTTAGGTCTTTAG |
| 49 | 3 | TAGGAGGATAATATGTATCCGGTGCATCGGCCTGACTTTCCCC |
| 50 | 3 | TAGGAGGGCTGAAAACTTGCTTCTTCCCGGTGCAGTTATAACA |
| 51 | 3 | TAGGAGGATAATATGTATCCGATGCATGGGCCCGACTTTCCCC |
| 52 | 3 | TGCGTTTTCCTTGGGGTTCAGGGTAGGATGGGGGTGGAGGTGG |
| 53 | 3 | GGGGGGCGGGTGGGCTGGTAAAAGGTGATGCGGGGGTATTGTT |
| 54 | 3 | TAGGAGGATAATATGTATCCGGTGCATCGGCCCAACTTTCCCC |
| 55 | 3 | CCAATCTCGGAAGGTTTAAATAAGGTGGTCTTTAGGTCTTTAG |
| 56 | 3 | TACGTTAAGTGGGTCGGGAGGGGGGAATAGGGGGTTTGGTTGG |
| 57 | 3 | GTGAGGTCGGTGGGGCGGGGGATGGTGGGGGGTCGTTTACATT |
| 58 | 3 | CGATATTGGGGGGGGGTTGGCGGGCTATTTTCCGGGTGGGTG |
| 59 | 3 | TCGGTTCCTGTTAATTCGCTGGTGGTTGGTGGGGTGGCGGATG |
| 60 | 3 | GCGGGGAGGTGGGGGTGGGTGGAGGGTTGGTTACTCTCTACT |
| 61 | 3 | CGGGAATGGGAGGGTGGGGGTGGTGGCCGGGTCGTGTTATACC |
| 62 | 3 | TAGGAGGATAATATGTATCCGGTGCATCGGTCCGACTTTCCCC |
| 63 | 3 | TATAGTTGGGCGTAGGCGGGGGGGGGTGGTTGGGAGGTCCAAG |
| 64 | 3 | TAGGAGGATAATATGTATCCGGTGCATCGGCCCGACCTTCCCC |
| 65 | 3 | TCGATCGTCCTCAGGATCTCGTGGTTCAAATCATAAAGATTAT |
| 66 | 3 | TGCTGTCTGGGCGGGGGCGGTCTTGTGGTTTCTTTGGGGGGGG |
| 67 | 3 | GCGAGACAGGAGGGTGGTCTTATACGTGGGGGGGGGTGGTTGG |
| 68 | 3 | TAGGAGGGCTGAAGACTTGCTTCTTCCCGGTGCAGTTATAACA |
| 69 | 3 | CGTGTGGGGGGTGGGTTGGGCTCGGGTTGTTATCAGTTCCATG |
| 70 | 3 | CGATATTGGGGGGGGGGTTGGCGGGCTATTTTCCGGGTGGGTG |
| 71 | 3 | TAGGAGGATAATATGTATCCGGTGCATCGGCCCGACTTTCCTC |
| 72 | 3 | TAGGAGGATAATATGTATCCGGTGCATCGGCTCGACTTTCCCC |
| 73 | 3 | CTTCGCTCGTTTCAATGTTTAGTTCTGGTCTTTAGGTCTTTAG |
| 74 | 3 | GGACATGGGTTGGGTCGGGAGGGGGTGGTCGGTTGGGCAGTAA |
| 75 | 3 | TAGGAGGATAATATGTATACGATGCATCGGCCCGACTTTCCCC |
| 76 | 3 | TAGGAGGATAATATGTATCAGATGCATCGGCCCGACTTTCCCC |
| 77 | 4 | TGGATGTATGGGGTCTCGGGGTGGGAGGGTTCAACTTATCTGG |
| 78 | 4 | GTCCGCTTGGGGGTGGGTATCGAAAATTCGCGTTCTGGGGCGG |
| 79 | 4 | TCTTGTACAAATAGGAGGGAAGGGGGTTTTGGGAGGTGGGTGG |
| 80 | 4 | CTTCGCTCGTTTCAATGTTCAGTTCTGGTCTTTAGGTCTTTAG |
| 81 | 4 | CTGATGTTAGTAGGTCGGGGTCCGGTTGGGGGTTGGGTTGAGG |
| 82 | 4 | TGGCTCGTGGACGTGGTGGTGGCGGGTCGTGGGGGTGGGTAGG |
| 83 | 4 | TAGGAGGATAATATGTATCCGATGCATCGGCACGACTTTCCCC |
| 84 | 4 | CGGGGAGGGGGGGTCGGGGTATTTATTGTGTATGTTTTTTGTG |
| 85 | 4 | TGACTGTATCTTGGGGCGGGTTCTGGGGGGGGTGTATTGTTCA |
| 86 | 4 | TAGGAGGATAATATGTATCCGATGCATCGGCCCGACTTTCACC |
| 87 | 4 | TCATGTCTAGGGGGGGGAAGTCGGTTTGGGTGGGTACTCTGTG |
| 88 | 4 | CTTGTTTCGCTTTGGGTTTGGGCGGGTGGGTCAATTCCTGTTG |
| 89 | 4 | GGTGGGGGCCCTCGGTACTGTGGCGGGGTGGGTGGGTTTAGTG |
| 90 | 4 | TGCGTTTTCCTTGGGGTTCAGGGTAGGATGGGGGTGGAGGTGG |
| 91 | 4 | TGGTGGGGTGGGTCTGTGGGGTGGTTTTGTTCTTATCGGGGTT |
| 92 | 4 | TGGGTGGGTTACGGGTGGGTGTTGTTATCGCGCTGATCTGGTT |
| 93 | 4 | CGTGACGGTTTTAATCAGGGGGGGGACTCTAACATTTGGGTGG |
| 94 | 4 | TGCTCATATCGTGGGGGGATGGGGTTGCTAGTGGATGGGGTGG |
| 95 | 4 | GGGGGGCGGGTGGGCTGGTAAAAGGTGATGCGGGGGTATTGTT |
| 96 | 4 | TGATGTGGGGGGTGGGGTATAATACTTATGTTTGGGGTTTGGG |
| 97 | 4 | TTGGGTGGGTGGGAATGGGTATTTTTTCTTCGGGCGATGTTTG |
| 98 | 4 | TAGTTGGATACTGGATTTGGGAGGGATGGGGGGAGGAGGGTGG |
| 99 | 4 | CTGGAAGGTTGGGTGTGGGGCGGGGGGGAGGTCTCTCTATGT |
| 100 | 4 | TACGTTAAGTGGGTCGGGAGGGGGGAATAGGGGGTTTGGTTGG |
| 101 | 4 | TGCCGTGGGCCGGGGAGGGTGGGTTGGCGTCTCTGTTTCGATA |
| 102 | 4 | GGGGGGGCGGCCGGGGTGGACTGTGGCCCGTCTTCGTATTGTT |
| 103 | 4 | TGGTGGTGGCTGGGGGACGGGTATCCTGGAATTAGGGGTGGG |
| 104 | 4 | TCGGTTCATGTTGGGTGGGATCGGGGCGGGGTTTCTTCTCCTG |
| 105 | 4 | TAGGAGGATAATATGTATACGATGCATCGGCCCGACTTTCCCC |
| 106 | 4 | TCGTGGGTGTGTTCTGGGGGGCGTGGACGGGGGTTAATGGGCA |
| 107 | 1 | TAGGAGGATAATATGTATCCGATGCATCGGCCCGACTTTCCCC |
| 108 | 1 | TAAGAGTCTTAGGATGACGTCATTCGTCCGTCACGGTGCGGGA |
| 109 | 1 | GCCTGGCCAGATAGCAGTTACCTTACGGGATCTATATTCACCG |
| 110 | 1 | TGGCTCGTGGACGTGGTGGTGGCGGGTCGTGGGGGTGGGTAGG |
| 111 | 1 | TTCGTGTTCATCTGTTTATTGTTATTCACAATCCGTCTTTTGT |
| 112 | 1 | CGAATCCGTCGACCGCCCTCGTAACCATCCAACCCAGTCTCCT |
| 113 | 1 | CAGGAAAGTTACTTATCTTTTAGACGGTTATGTTCTCATTACT |
| 114 | 1 | ATCTGCTCGATACGTAGATAGTCTGCTCGATACAAAAGGGTGG |
| 115 | 1 | CGATGAGCGGGCTCCGATATTGTGTCGGCGTGACTACCTTGAT |
| 116 | 1 | GGTCGGCCTATTTATTGCGGCACGTTGTTTCTTGATGTCGCCC |
| 117 | 1 | TCGAATTCAGTTCTACATGTGTATTTCTTGCTCCGTTTCAGAA |
| 118 | 1 | TCGGTCCGGCAACAAACCCCACGCGCCTTCGATATGCCTGTCG |
| 119 | 2 | CCAATCTCGGAAGGTTTAAATAAGGTGGTCTTTAGGTCTTTAG |
| 120 | 2 | CGATATTGGGGGGGGGGTTGGCGGGCTATTTTCCGGGTGGGTG |
| 121 | 2 | CGGGAATGGGAGGGTGGGGGTGGTGGCCGGGTCGTGTTATACC |
| 122 | 2 | CGTGGTGGGTTCTTGGGTGGGGGGGGAGGGTTGGCGTAGTATA |
| 123 | 2 | GTGAGGTCGGTGGGGCGGGGGATGGTGGGGGGTCGTTTACATT |
| 124 | 2 | TACGTTAAGTGGGTCGGGAGGGGGGAATAGGGGGTTTGGTTGG |
| 125 | 2 | TAGGAGGATAATATGTATCCGGTGCATCGGCCCAACTTTCCCC |
| 126 | 2 | TAGGAGGGCTGAAAACTTGCTTCTTCCCGGTGCAGTTATAACA |
| 127 | 2 | TCGGTTCCTGTTAATTCGCTGGTGGTTGGTGGGGTGGCGGATG |
| 128 | 2 | TGCTGTCTGGGCGGGGGCGGTCTTGTGGTTTCTTTGGGGGGGG |
| 129 | 2 | AACATGGGGTTCTGATAAACCTGTGCCAAATACATTGTTGAGT |
| 130 | 2 | ATTCCTCCTTTGTAAGGGATGATATCCAACTCCTCTGCGTTCG |

[0963] Individual aptamer candidates in Table 12 are synthesized. The aptamers are labeled with a fluorescent label and used to detect binding to bead-capture microvesicles using a microbead assay format. The microbead results are used to identify aptamers and panels of aptamers that differentiate cancer and non-cancer plasma samples.

### Example 19: Aptamer Based Precipitation of Microvesicles in Plasma

[0964] Aptamers can specifically recognize target proteins with nanomolar affinity and have some potential advantages compared to antibodies due to their chemical stability, ease of synthesis and overall reproducibility. Microvesicles were isolated from a rat glioma cell line model that expresses or does not express the human EGFR protein in order to optimize aptamer-microvesicle complex formation and isolation in plasma. Microvesicles spiked into human plasma were precipitated with the positive EGFR DNA or RNA aptamer but not with a reverse complement control sequence. There was no observed binding of the positive or negative aptamer to microvesicles that do not express EGFR. Binding of aptamers to microvesicles was confirmed with aptamer based ELISAs, EMSA assays, and flow cytometry. These results demonstrate aptamer-based precipitation of microvesicles from a complex biological sample.

### Example 20: Quantitative Proteomics of EGFR, EGFRviii, and EGFR Negative Microvesicles from a Rat Glioma Cell Line

[0965] In this Example, we performed quantitative proteomics on microvesicles isolated from a rat glioma cell line F98 (parental line), F98(EGFR) and F98(EGFRviii). Different lots of microvesicles purified from each cell line type were considered biological replicates and each biological replicate was analyzed in four technical replicates by tandem mass tag 6-plex (TMT) peptide labeling and LC-MS/MS. The general microvesicle markers CD81, CD9, CD63, Tsg101, and Alix were identified in all technical replicates. Multiple proteins were found to be up or down-regulated including a 7.5-fold increase in EGFR and a 2.6-fold increase in the EGFR binding partner HMCN2 in the F98[EGFR] compared with the parental line. These results indicate that expression of a single biomarker may affect global proteomic changes in microvesicles.

### Example 21: Oligonucleotide probe library

[0966] This Example presents further development of the oligonucleotide probe library to detect biological entities such as described in Example 18 above. In this Example, steps were taken to reduce the presence of double stranded oligonucleotides (dsDNA) when probing the patient samples. The data were also generated comparing the effects of 8% and 6% PEG used to precipitate microvesicles (and potentially other biological entities) from the patient samples.

[0967] Protocol:

[0968] 1) Pre-chill tabletop centrifuge at 4° C.

[0969] 2) Protease inhibition: dissolve 2 tablets of “cOmplete ULTRA MINI EDTA-free EASYpack” protease inhibitor in 1100 ul of H₂O (20× stock of protease inhibitor).

[0970] 3) Add 50 ul of protease inhibitor to the sample (on top of frozen plasma) and start thawing: 1 ml total ea.

[0971] 4) To remove cells/debris, spin samples at 10,000×g, 20 min, 4° C. Collect 1 ml supernatant (SN).

[0972] 5) Mix 1 ml supernatant from step 4 with 1 ml of 2×PBS 6 mM MgCl₃, collect 400 ul into 3 tubes (replicates A, B, C) and use it in step 6.

[0973] 6) Add competitor per Table 13: make dilutions in 1×PBS, 3 mM MgCl₂, mix well, pour into trough, pipet using multichannel.

TABLE 13
Competitors

| | | | | | Volume from | | | |
|---|---|---|---|---|---|---|---|---|
| | | | Intermediate | | stock to make | Buffer to make | Final | |
| | Type of | Stock | stock | Number of | intermediate | intermediate | Volume, | Final |
| units | Competitor | Concentration | concentration | samples | stock, ul | stock | ul | Concentration |
| ng/ul | Salmon DNA | — | 40 | — | — | — | 425.5 | 0.8 |
| ng/ul | tRNA | — | 40 | — | — | — | 425.5 | 0.8 |
| x | S1 | 20 | 0.5 | 280 | 65.5 | 2555.6 | 425.5 | 0.01 |

[0974] 7) Incubate for 10 min, RT, end-over-end rotation

[0975] Pool of 6-3S and 8-3S oligonucleotide probing libraries is ready: 2.76 ng/ul (185 ng). Save pool stock and dilutions. New pool can be made by mixing 171.2 ul (500 ng) of library 6-3S (2.92 ng/ul) with 190.8 ul (500 ng) of library 8-3S (2.62 ng/ul). Aliquot pooled library into 30 ul and store at −80 C.

[0976] Add ssDNA oligonucleotide probing library to the final concentration 2.5 μg/ul for binding. Make dilutions in 1×PBS, 3 mM MgCl₂.

TABLE 14
Probe library calculations

| | | Required | ul from | | | | Volume | |
|---|---|---|---|---|---|---|---|---|
| Original | | working | original | ul of | | | per sample | Final |
| stock, | Lib | stock | stock to | buffer to | Final | Number of | from working | concentration |
| ng/ul | Name | (ng/ul) | make working | make working | volume, ul | samples | stock | (pg/ul) |
| 2.76 | Pooled | 0.1 | 26.1 | 694.1 | 720.2 | 60 | 10.9 | 2.5 |
| | library | | | | | | | |
| | 6-3S/8-3S | | | | | | | |

[0977] 8) Binding: Incubate for 1 h at RT with rotation.

[0978] 9) Prepare polymer solution: 20% PEG8000 in 1×PBS 3 mM MgCl2 (dilute 40% PEG8000 with 2×PBS with 6 mM MgCl2). Add 20% PEG8000 to sample to the final concentration 6%. Invert few times to mix, incubate for 15 min at 4 C

TABLE 15
PEG calculations

| | | | | | Volume of | | | |
|---|---|---|---|---|---|---|---|---|
| | | | | Volume | buffer to | Sample | | Total |
| PEG | PEG | Final | Final | 20% PEG | adjust final | volume before | Total | 20% PEG |
| MW | stock, % | conc., % | volume, ul | to add, ul | volume, ul | adding PEG | samples | needed, ml |
| 8000 | 20 | 6 | 622.8 | 186.9 | −0.4 | 436.4 | 60 | 11.2 |

[0979] 10) Spin at 10,000×g for 5 min, RT.

[0980] 11) Remove SN, add 1 ml 1×PBS, 3 mM MgCl2 and wash pellet by gentle invertion with 1 ml aptamer buffer.

[0981] 12) Remove buffer, Re-suspend pellets in 100 ul H2O: incubate at RT for 10 min on mixmate 900 rpm to re-suspend.

[0982] 13) Make sure each sample is re-suspended by pipetting after step 13. Make notes on hardly re-suspendable samples.

[0983] 14) 50 ul of re-suspended sample to indexing PCR->next generation sequencing (NGS).

[0984] 15) Keep leftover at 4 C

[0985] Technical Validation:

[0986] The current protocol was tested versus a protocol using 8% PEG8000 to precipitate microvesicles. The current protocol further comprises steps to reduce dsDNA in the oligonucleotide probing libraries.

[0987] FIG. 12A shows the within sample variance (black) between binding replicates and the between sample variance (grey). Black is on top of grey, thus any observable grey oligo is informative about differences in the biology of two patient samples. This evaluation of Sources of Variance shows that the technical variances is significantly smaller than the biological variance.

[0988] FIG. 12B shows the impact of using a higher proportion of single stranded DNA and PEG 6% isolation (white bars) compared to when there is a higher amount of double stranded DNA and 8% PEG (grey). This data indicates that the protocol in this Example improves biological separation between patients.

[0989] The plots in FIG. 12C show the difference between an earlier protocol (PEG 80 with increased dsDNA) and modified protocol of the Example (PEG 6% no dsDNA). The black is the scatter between replicates (independent binding events) and the grey is the difference between patients. This data shows that the signal to noise increased significantly using the newer protocol.

[0990] Patient Testing:

[0991] The protocol above was used to test patient samples having the following characteristics:

TABLE 16
Patient characteristics

| Sample Type | Description |
|---|---|
| Cancer | Mixed type carcinoma; Malignant; |
| Cancer | Invasive, predominant intraductal component (8500/3) |
| Cancer | Fibrocystic Changes; Invasive lobular carcinoma - 8520/3; Lobular carcinoma in |
| | situ - 8520/2; Benign; In situ and grade 3 intraepith; Malignant; Fat necrosis, |
| | periductal inflammation, malignant cellsFat necrosis; Inflammation; Benign; |
| Cancer | Invasive, predominant intraductal component (8500/3) |
| Cancer | Mucinous (colloid) adenocarcinoma (8480/3) |
| Cancer | Invasive lobular carcinoma - 8520/3; Microcalcifications; Benign; Malignant; |
| Cancer | Otherfibrocystic changeInvasive, NOS (8500/3) |
| Cancer | Invasive ductal carcinoma, not otherwise specified (NOS) - 8500/3; Malignant; |
| Cancer | Invasive ductal carcinoma, not otherwise specified (NOS) - 8500/3; Malignant; |
| Cancer | Intraductal carcinoma, non-infiltrating, NOS (in situ) (8500/2) |
| Cancer | Atypical lobular hyperplasia |
| | Otherfibrocystic changes, inter and intralobular fibrosis, apocrine metaplasia, |
| | columnar cell change, microcalcificationsInvasive, NOS (8500/3) |
| Cancer | FibroadenomaInvasive, NOS (8500/3) |
| Cancer | Ductal carcinoma in situ - 8500/2; Invasive ductal carcinoma, not otherwise |
| | specified (NOS) - 8500/3; Microcalcifications; Benign; In situ and grade 3 |
| | intraepith; Malignant; |
| Cancer | Ductal carcinoma in situ - 8500/2; Invasive lobular carcinoma - 8520/3; Lobular |
| | carcinoma in situ - 8520/2; In situ and grade 3 intraepith; Malignant; |
| Cancer | Ductal carcinoma in situ - 8500/2; Invasive ductal carcinoma, not otherwise |
| | specified (NOS) - 8500/3; Microcalcifications; Benign; In situ and grade 3 |
| | intraepith; Malignant; Focal Micropapillary Features, invasive ductal carcinoma |
| | with micropapillary features, invasive ductal carcinoma with mucinous and |
| | micropapillary featInvasive ductal carcinoma with micropapillary and mucinous |
| | features; Invasive micropapillary carcinoma - 8507/3; Malignant; |
| Cancer | Invasive, predominant intraductal component (8500/3) |
| Cancer | Invasive ductal carcinoma, not otherwise specified (NOS) - 8500/3; Malignant; |
| Cancer | Invasive, NOS (8500/3) |
| Cancer | Infiltrating duct and lobular carcinoma (8522/3) |
| Cancer | Invasive, predominant in situ component (8520/3) |
| Non-Cancer | Otherusual ductal hyperplasia, apocrine metaplasia, microcysts, elastosis |
| Non-Cancer | Otherstromal fibrosis, fibrous cyst wall |
| Non-Cancer | Otherfibrocystic change, stromal fibrosis, cyst formation, microcalcifications, |
| | apocrine metaplasia, sclerosing adenosis, usual ductal hyperplasia |
| Non-Cancer | Otherfibrocystic changes, apocrine metaplasia, cystic change, usual ductal |
| | hyperplasia |
| Non-Cancer | Otherfibrocystic change, microcalcifications |
| Non-Cancer | Fibroadenoma |
| Non-Cancer | Otherintraductal papilloma, sclerosis, microcalcifications, stromal fibrosis |
| Non-Cancer | Fibroadenoma |
| Non-Cancer | Otherfat necrosis |
| Non-Cancer | Otherstromal fibrosis, microcalcifications |
| Non-Cancer | Otherfibrocystic change, microcystic change, focal secretory features |
| Non-Cancer | Otherstromal fibrosis |
| Non-Cancer | Fibroadenoma Otheradenosis, columnar cell change/hyperplasia, usual ductal |
| | hyperplasia |
| Non-Cancer | OtherFNA - insufficient material for diagnosis |
| Non-Cancer | Otherintraductal papilloma |
| Non-Cancer | Otherfibrocystic changes, duct ectasia, usual ductal hyperplasia, apocrine |
| | metaplasia, microcalcifications |

[0992] Microvesicles (and potentially other biological entities) were precipitated in blood (plasma) samples from the above patients using polymer precipitation with PEG as indicated above. The protocol was used to probe the samples with the oligonucleotide probe libraries. Sequences that bound the PEG precipitated samples were identified using next generation sequencing (NGS).

[0993] FIG. 12D shows scaler plots of a selection of results from testing the 40 patients listed previously. The spread in the data indicates that large numbers of oligos were detected that differed between samples. The number of significant oligos found is much greater than would be expected randomly as shown in Table 17. The table shows the number of oligonucleotides sorted by copy number detected and p-value. The d-# indicates the number copies of a sequence observed for the data in the rows.

TABLE 17
Expected versus observed sequences

| | Total Number | P-0.1 | P-0.05 | P-0.01 | P-0.005 |
|---|---|---|---|---|---|
| d-50 | 83,632 | 47,020 | 30,843 | 5,934 | 2,471 |
| d-100 | 52,647 | 29,106 | 19,446 | 3,893 | 1,615 |
| d-200 | 28,753 | 14,681 | 9,880 | 2,189 | 914 |
| d-500 | 10,155 | 4,342 | 2,927 | 725 | 315 |
| d-50 | 100.0% | 56.2% | 36.9% | 7.1% | 3.0% |
| d-100 | 100.0% | 55.3% | 36.9% | 7.4% | 3.1% |
| d-200 | 100.0% | 51.1% | 34.4% | 7.6% | 3.2% |
| d-500 | 100.0% | 42.8% | 28.8% | 7.1% | 3.1% |

| | | | | |
|---|---|---|---|---|
| Maximum expected | 10.0% | 5.0% | 1.0% | 0.5% |

[0994] As a control, the cancer and non-cancer samples were randomly divided into two groups. Such randomization of the samples significantly reduced the number of oligos found that differentiate between sample groups. Indeed, there was a 50-fold increase in informative oligos between the cancer/non-cancer grouping versus random grouping. FIG. 12E shows data as in Table 17 and indicates the number of observed informative oligos between the indicated sample groups.

[0995] FIG. 12F shows distinct groups of oligos that differentiate between cancer and non-cancer samples. The figure shows a heatmap of the 40 samples tested with oligos selected that had more than 500 copies and p-value less than 0.005. There are clear subpopulations emerging with a distinct non-cancer cohort at the top. The non-cancer samples have boxes around them on the left axis. FIG. 12G is similar and shows results with an additional 20 cancer and 20 non-cancer samples. As shown, analysis with the 80 samples provides the emergence of more distinct and larger clusters.

[0996] The data for the additional 80 samples was also used to compare the consistency of informative oligos identified in different screening experiments. Of the 315 informative oligos identified using the first set of 40 patients, 86% of them showed fold-change in a consistent manner when tested on the independent set of 40 patients.

### Example 22: Enrichment of Oligonucleotide Probes to Breast Cancer (BrCa) and Non-BrCa Derived Microvesicles Using a Balanced Library Design

[0997] In this Example, a naïve ADAPT oligonucleotide library was screened to enrich oligonucleotides that identify microvesicles circulating in the blood of breast cancer patients and microvesicles circulating in the blood of healthy, control individuals (i.e., without breast cancer). The input library was the naïve F-TRin-35n-B 8-3s library, which comprises a 5′ region (5′ CTAGCATGACTGCAGTACGT (SEQ ID NO. 131)) followed by the random naïve aptamer sequences of 35 nucleotides and a 3′ region (5′ CTGTCTCTTATACACATCTGACGCTGCCGACGA (SEQ ID NO. 132)). The “balanced” design is described in Example 23 of Int'l Patent Publication WO/2015/031694 (Appl. No. PCT/US2014/053306, filed Aug. 28, 2014). The working library comprised approximately 2×10¹³ synthetic oligonucleotide sequences. The naïve library may be referred to as the “L0 Library” herein.

[0998] The L0 Library was enriched against fractionated plasma samples from breast cancer patients and from healthy (non-breast cancer) controls using the protocol shown in FIG. 21A. In Step 1, an aliquot of approximately 10¹¹ sequences of PCR-amplified LO was incubated with pooled blood-plasma from 59 breast cancer patients with positive biopsy (represented by “Source A” in FIG. 21A). In parallel, another aliquot of 10¹¹ sequences was incubated with pooled blood-plasma from 30 patients with suspected breast cancer who proved negative on biopsy and 30 self declared healthy women (represented by “Source B” in FIG. 21A). In Step 2, microvesicles (extracellular vesicles, “EV”) were precipitated using ultracentrifugation (UC) from both L0-samples. The EV-associated oligodeoxynucleotides (ODNs) were recovered from the respective pellets. In Step 3, a counter-selection step (Step 3) was carried out by incubation of each enriched library with plasma from the different cohorts to drive the selection pressure towards enrichment of ODNs specifically associated with each sample cohort. In this step, sequences contained in the EV pellets were discarded. In Step 4, a second positive selection was performed. In this step, the sequences contained in the respective supernatants (sn) from Step 3 were mixed with plasma from another aliquot of each positive control sample-population, and EVs were again isolated. EV-associated ODNs were recovered, representing two single-round libraries called library L1 for positive enrichment of cancer (positive biopsy) patients, and library L2 for the positive enrichment against control patients. In a final step, L1 and L2 were amplified by PCR, reverted to single stranded DNA (ssDNA), and mixed to yield library L3.

[0999] This enrichment scheme was iterated two times more using L3 as the input to further reduce the complexity of the profiling library to approximately 10⁶ different sequences. In Step 2, UC was used for partitioning of microvesicles, which may increase the specificity for the EV fraction. In Steps 3 and 4, partitioning was performed using PEG-precipitation. This procedure enriches for ODNs specific for each biological source. Library L3 contains those ODNs that are associated with targets characteristic for EV-populations from both sources, i.e. ODNs acting as aptamers that bind to molecules preferentially expressed in each source. A total of biopsy-positive (n=59), biopsy-negative (n=30), and self-declared normal (n=30) were used in the first round of L3 enrichment, while only the cancer and non-cancer samples were used in the subsequent rounds.

[1000] The enriched libraries were characterized using next-generation-sequencing (NGS) to measure copy numbers of sequences contained in each profiling library. NGS of L0 shows that the vast majority of sequences existed in low copy numbers, whereas libraries L1 and L2 showed significantly higher average counts per sequence (FIG. 21B) and a reduced amount of different sequences, with unaltered total valid reads, (FIG. 21C) consistent with an enrichment process.

### Example 23: Analysis of ADAPT-Identified Biomarkers

[1001] As described herein, e.g., in the section entitled “Aptamer Target Identification,” an unknown target recognized by an aptamer can be identified. In this Example, an oligonucleotide probe library (also referred to as Adaptive Dynamic Artificial Poly-ligand Targeting (ADAPT) libraries or Topographical Oligonucleotide Probe “TOP” libraries) was developed as described here and targets of the screened oligonucleotides were determined. This Example used a ADAPT library generated by enriching microvesicles collected from the blood of breast cancer patients and normal controls (i.e., non-cancer individuals). The enrichment protocols are described herein in Example 22.

[1002] Materials & Methods

[1003] SBED Library Conjugation

[1004] A naïve F-TRin-35n-B 8-3s library was enriched against microvesicles from normal female plasma. The naïve unenriched library comprised a 5′ region (5′ CTAGCATGACTGCAGTACGT (SEQ ID NO. 131)) followed by the random naïve aptamer sequences of 35 nucleotides and a 3′ region (5′ CTGTCTCTTATACACATCTGACGCTGCCGACGA (SEQ ID NO. 132)). The naïve library may be referred to as the “L0 Library” herein and the enriched library referred to as the “L2 library.” See Example 22. The screened library was PCR amplified with a C6-amine sense primer (C6 Amine-5′ CTAGCATGACTGCAGTACGT 3′ (SEQ ID NO. 131)) and a 5′ phosphorylated anti-sense primer (5′ Phos TCGTCGGCAGCGTCA (SEQ ID NO. 133)), the purified product was strand separated and conjugated with sulfo-SBED (Thermo Scientific) according to Vinkenborg et al. (Angew Chem Int Ed Engl. 2012, 51:9176-80) with the following modifications: The reaction was scaled down to 5 μg C6-amine DNA library (8.6 μM) in 25 mM HEPES-KOH, 0.1M NaCl, pH 8.3 and incubated with either 100-fold molar excess of sulfo-SBED or DMSO in a 21 μL volume for 30 min at room temp in the dark. The SBED-conjugated library was immediately separated from the unconjugated library and free sulfo-SBED by injection onto a Waters X-Bridge™ OST C-18 column (4.6 mm×50 mm) and fractionated by HPLC (Agilent 1260 Infinity) with a linear gradient Buffer A: 100 mM TEAA, pH7.0, 0% ACN to 100 mM TEAA, pH7.0, 25% ACN at 0.2 ml/min, 65° C. There SBED-conjugated fractions were desalted into water with Glen Gel-Pak™ Cartridges and concentrated by speed-vac. SBED conjugation was confirmed by LC-MS and/or a dot blot with streptavidin-HRP detection.

[1005] Binding Reaction and Cross-Linking

[1006] SBED library functionalization was tested by performing the ADAPT assay with SBED vs DMSO mock conjugated control C6-amine library and sequenced on a HiSeq 2500™ (Illumina Corp.). The aptamer precipitation was performed with forty-eight ADAPT reactions incubated for 1 hr with end-over-end rotation at room temp with a 5 ng input of SBED conjugated library per 200 μL of plasma (pre-spun to remove cellular debris at 10,000×g for 20 min, 4° C.) in 1×PBS, 3 mM MgCl₂, 0.01 mM dextran sulfate, 40 ng/μl salmon sperm DNA and 40 ng/μl yeast transfer RNA, and cOmplete ULTRA Mini EDTA-Free™ protease inhibitors (Roche) equivalent to ˜240 ng library and 9.6 mls plasma. A duplicate set of 48 reactions was prepared with the DMSO control C6-amine library. Aptamer library-protein complexes were precipitated with incubation in 6% PEG8000 for 15 min at 4° C. then centrifuged at 10,000×g for 5 min. Pellets were washed with 1 ml 1×PBS, 3 mM MgCl2 by gentle inversion to remove unbound aptamers. The washed pellets were resuspended in 100 μL of water and subjected to photo-cross-linking at 365 nm with a hand-held 3UV (254NM/302NM/365NM) lamp, 115 volts (Thermo Scientific) for 10 min on ice with 1-2 cm between the 96-well plate and lamp.

[1007] Oligonucleotide Precipitation

[1008] Cross-linked reactions were subsequently pooled (4.8 ml) per library or 4.8 ml of 1×PBS (AP bead only control) and incubated with 10 μL of Prepared Dynabeads® MyOne™ Streptavidin C1 (10 mg/ml) (Life Technologies) (pre-washed with 1×PBS, 0.01% Triton X-100) shaking for 1 hr at room temp. Beads were transferred to an eppendorf tube and lysed for 20 min with lysis buffer (50 mM Tris-HCl, 10 mM MgCl2, 200 mM NaCl, 0.5% Triton X-100, 5% glycerol, pH 7.5) on ice, washed 3 times with wash buffer 1 (10 mM Tris-HCl, 1 mM EDTA, 2M NaCl, 1% Triton X-100), followed by 2 times with wash buffer 2 (10 mM Tris-HCl, 1 mM EDTA, 2M NaCl, 0.01% Triton X-100) as described by Vinkenborg et al. (Angew Chem Int Ed Engl. 2012, 51:9176-80). Cross-linked proteins were eluted by boiling 15 min in 1×LDS sample buffer with reducing agent added (Life Technologies) and loaded on a 4-12% SDS-PAGE gradient gel (Life Technology). Proteins and DNA were detected with double staining with Imperial Blue Protein Stain (Thermo Scientific) followed by Prot-SIL2™ silver stain kit (Sigma) used according to manufacturer's instructions in order to enhance sensitivity and reduce background.

[1009] Protein Identification

[1010] Protein bands that appeared to differ between the cancer and normal were excised from the gradient gels and subjected to liquid chromatography-tandem mass spectrometry (LC-MS/MS).

[1011] Results

[1012] ADAPT protein targets were identified from bands cut from a silver stained SDS-PAGE gel (FIG. 13). Aptamer-SBED protein complexes (lane 3) or Aptamer-DMSO protein complexes (control-lane 4) were precipitated with 6% PEG8000, subjected to UV photo-cross-linking, and pulled-down with Streptavidin coated beads. Eluate was analyzed under reducing conditions by SDS-PAGE and silver staining. Aptamer library alone (5 ng) (lane 1) was loaded as a control for migration of the library (second to bottom arrows) and an equal volume of eluate from a bead only sample (lane 4) was loaded as a streptavidin control to control for potential leaching of the streptavidin monomer (bottom arrow) under the harsh elution conditions. Upper arrows (“Targets”) indicate specific or more predominant bands identified with the SBED-conjugated library vs. the mock DMSO treated control C6-amine library. Indicated target protein bands were cut out and sent for LC-MS/MS protein identification or indicated DNA library bands were eluted, reamplified and sequenced. The identified proteins are those that appeared as upregulated in the normal samples.

[1013] Tables 18-25 list human proteins that were identified in 8 bands excised from the silver stained gel. In all tables the proteins are those identified in the oligo-SBED protein complexes with proteins identified in the corresponding control lanes removed. The band numbers in the tables indicate different bands cut from the gel (FIG. 13). Accession numbers in the table are from the UniProt database (www.uniprot.org). “GN×” is followed by the gene name. Various protein classifications indicated in the Tables 18-25 include Nucleic Acid Binding Proteins (NAB), Tumor suppressors (TS), cell adhesion/cytoskeletal (CA/CK) and abundant plasma proteins (ABP).

TABLE 18
Band 3

| Accession | | |
|---|---|---|
| number | Class | Protein name |
| P02538 | CA/CK | Keratin, type II cytoskeletal 6A GN = KRT6A |
| P15924 | CA/CK | Desmoplakin GN = DSP |
| P04259 | CA/CK | Keratin, type II cytoskeletal 6B GN = KRT6B |
| P60709 | CA/CK | Actin, cytoplasmic 1 GN = ACTB |
| P20930 | CA/CK | Filaggrin GN = FLG |
| P07476 | CA/CK | Involucrin GN = IVL |
| P31947 | TS | 14-3-3 protein sigma GN = SFN |
| Q7Z794 | CA/CK | Keratin, type II cytoskeletal 1b GN = KRT77 |
| P02545 | NAB | Prelamin-A/C GN = LMNA |
| P19012 | CA/CK | Keratin, type I cytoskeletal 15 GN = KRT15 |
| P47929 | CA/CK | Galectin-7 GN = LGALS7 |
| | & TS | |
| P11142 | | Heat shock cognate 71 kDa protein GN = HSPA8 |
| P58107 | NAB | Epiplakin GN = EPPK1 |
| P08107 | | Heat shock 70 kDa protein 1A/1B GN = HSPA1A |
| Q02413 | CA/CK | Desmoglein-1 GN = DSG1 |
| P06396 | CA/CK | Gelsolin GN = GSN |
| O60814 | NAB | Histone H2B type 1-K GN = HIST1H2BK |
| P68104 | NAB | Elongation factor 1-alpha 1 GN = EEF1A1 |
| P05387 | NAB | 60S acidic ribosomal protein P2 GN = RPLP2 |
| Q7RTS7 | CA/CK | Keratin, type II cytoskeletal 74 GN = KRT74 |
| P31946 | TS | 14-3-3 protein beta/alpha GN = YWHAB |
| Q13835 | CA/CK | Plakophilin-1 GN = PKP1 |
| P14923 | CA/CK | Junction plakoglobin GN = JUP |
| P09651 | NAB | Heterogeneous nuclear ribonucleoprotein A1 GN = HNRNPA1 |
| P07900 | | Heat shock protein HSP 90-alpha GN = HSP90AA1 |
| Q96KK5 | NAB | Histone H2A type 1-H GN = HIST1H2AH |
| P04406- | CA/CK | Glyceraldehyde-3-phosphate dehydrogenase GN = GAPDH |
| P10412 | NAB | Histone H1.4 GN = HIST1H1E |
| P04792 | | Heat shock protein beta-1 GN = HSPB1 |
| Q9NZT1 | | Calmodulin-like protein 5 GN = CALML5 |
| P81605 | | Dermcidin GN = DCD |
| P27348 | TS | 14-3-3 protein theta GN = YWHAQ |
| P55072 | NAB | Transitional endoplasmic reticulum ATPase GN = VCP |
| Q09666 | NAB | Neuroblast differentiation-associated protein AHNAK GN = AHNAK |
| P23246 | NAB | Splicing factor, proline- and glutamine-rich GN = SFPQ |
| Q15149 | CA/CK | Plectin GN = PLEC |
| Q8NC51 | NAB | Plasminogen activator inhibitor 1 RNA-binding protein GN = SERBP1 |
| P07237 | | Protein disulfide-isomerase GN = P4HB |
| O60437 | CA/CK | Periplakin GN = PPL |
| P01717 | ABP | Ig lambda chain V-IV region Hil |
| P55884 | NAB | Eukaryotic translation initiation factor 3 subunit B GN = EIF3B |
| P11021 | | 78 kDa glucose-regulated protein GN = HSPA5 |
| P01024 | | Complement C3 GN = C3 |
| P04350 | CA/CK | Tubulin beta-4A chain GN = TUBB4A |
| P01857 | ABP | Ig gamma-1 chain C region GN = IGHG1 |
| P61247 | NAB | 40S ribosomal protein S3a GN = RPS3A |
| P62937 | | Peptidyl-prolyl cis-trans isomerase A GN = PPIA |
| O15020 | CA/CK | Spectrin beta chain, non-erythrocytic 2 GN = SPTBN2 |
| P30101 | | Protein disulfide-isomerase A3 GN = PDIA3 |
| Q6KB66 | CA/CK | Keratin, type II cytoskeletal 80 GN = KRT80 |
| Q9UJU6 | CA/CK | Drebrin-like protein GN = DBNL |
| P47914 | NAB | 60S ribosomal protein L29 GN = RPL29 |
| P39023 | NAB | 60S ribosomal protein L3 GN = RPL3 |
| A6NMY6 | CA/CK | Putative annexin A2-like protein GN = ANXA2P2 |
| P60174 | CA/CK | Triosephosphate isomerase GN = TPI1 |
| P35241 | CA/CK | Radixin GN = RDX |
| P07305 | NAB | Histone H1.0 GN = H1F0 |
| P15259 | CA/CK | Phosphoglycerate mutase 2 GN = PGAM2 |
| P0CG05 | ABP | Ig lambda-2 chain C regions GN = IGLC2 |
| Q92817 | CA/CK | Envoplakin GN = EVPL |
| P06733 | NAB | MBP-1 of Alpha-enolase GN = ENO1 |
| P22626 | NAB | Heterogeneous nuclear ribonucleoproteins A2/B1 GN = HNRNPA2B1 |
| P62424 | NAB | 60S ribosomal protein L7a GN = RPL7A |
| P60660 | CA/CK | Myosin light polypeptide 6 GN = MYL6 |
| P04083 | NAB | Annexin A1 GN = ANXA1 |
| Q14134 | NAB | Tripartite motif-containing protein 29 GN = TRIM29 |
| P39019 | NAB | 40S ribosomal protein S19 GN = RPS19 |
| Q8WVV4 | CA/CK | Protein POF1B GN = POF1B |
| Q02878 | NAB | 60S ribosomal protein L6 GN = RPL6 |
| Q9Y6X9 | NAB | MORC family CW-type zinc finger protein 2 GN = MORC2 |
| Q9NQC3 | NAB | Reticulon-4 GN = RTN4 |
| Q5T753 | CA/CK | Late cornified envelope protein 1E GN = CA/CK E |

TABLE 19
Band 9

| Accession | | |
|---|---|---|
| number | Class | Protein name |
| P61626 | | Lysozyme C GN = LYZ |
| Q9HCK1 | NAB | DBF4-type zinc finger-containing protein |
| | | 2 GN = ZDBF2 |

TABLE 20
Band 1

| Accession | | |
|---|---|---|
| number | Class | Protein name |
| P01834 | ABP | Ig kappa chain C region GN = IGKC |
| P01765 | ABP | Ig heavy chain V-III region TIL |
| P04003 | NAB | C4b-binding protein alpha chain GN = C4BPA |
| P60709 | CA/CK | Actin, cytoplasmic 1 GN = ACTB |
| Q5T751 | CA/CK | Late cornified envelope protein 1C GN = LCE1C |

TABLE 21
Band 5

| Accession | | |
|---|---|---|
| number | Class | Protein name |
| P01860 | ABP | Ig gamma-3 chain C region GN = IGHG3 |
| O60902 | NAB | Short stature homeobox protein 2 GN = SHOX2 |

TABLE 22
Band 7

| Accession | | |
|---|---|---|
| number | Class | Protein name |
| Q04695 | CA/CK | Keratin, type I cytoskeletal 17 GN = KRT17 |
| Q7Z794 | CA/CK | Keratin, type II cytoskeletal 1b GN = KRT77 |
| Q6KB66 | CA/CK | Keratin, type II cytoskeletal 80 GN = KRT80 |
| P01833 | | Polymeric immunoglobulin receptor GN = PIGR |
| P01042 | | Kininogen-1 GN = KNG1 |
| Q02413 | CA/CK | Desmoglein-1 GN = DSG1 |
| P15924 | CA/CK | Desmoplakin GN = DSP |
| Q8TF72 | | Protein Shroom3 GN = SHROOM3 |
| P02671 | ABP | Fibrinogen alpha chain GN = FGA |
| Q5T749 | CA/CK | Keratinocyte proline-rich protein GN = KPRP |
| Q5VZP5 | | Inactive dual specificity phosphatase 27 |
| | | GN = DUSP27 |
| Q5T751 | CA/CK | Late cornified envelope protein 1C GN = LCE1C |
| Q9UL12 | | Sarcosine dehydrogenase, mitochondrial |
| | | GN = SARDH |
| P00698 | | Lysozyme C OS = Gallus gallus GN = LYZ |
| Q8N114 | | Protein shisa-5 GN = SHISA5 |

TABLE 23
Band 15

| Accession | | |
|---|---|---|
| number | Class | Protein name |
| P08238 | | Heat shock protein HSP 90-beta GN = HSP90AB1 |
| P68104 | NAB | Elongation factor 1-alpha 1 GN = EEF1A1 |
| P02675 | ABP | Fibrinogen beta chain GN = FGB |
| Q8TF72 | | Protein Shroom3 GN = SHROOM3 |
| P0CG05 | ABP | Ig lambda-2 chain C regions GN = IGLC2 |
| P78386 | CA/CK | Keratin, type II cuticular Hb5 GN = KRT85 |
| Q7Z5Y6 | | Bone morphogenetic protein 8A GN = BMP8A |
| O14633 | CA/CK | Late cornified envelope protein 2B GN = LCE2B |

TABLE 24
Band 17

| Accession | | |
|---|---|---|
| number | Class | Protein name |
| P02538 | CA/CK | Keratin, type II cytoskeletal 6A GN = KRT6A |
| P01834 | ABP | Ig kappa chain C region GN = IGKC |
| P06702 | | Protein S100-A9 GN = S100A9 |
| P68104 | NAB | Elongation factor 1-alpha 1 GN = EEF1A1 |
| P01024 | | Complement C3 GN = C3 |
| P81605 | | Dermcidin GN = DCD |
| P05109 | | Protein S100-A8 GN = S100A8 |
| Q5T751 | CA/CK | Late cornified envelope protein 1C GN = LCE1C |

TABLE 25
Band 19

| Accession | | |
|---|---|---|
| number | Class | Protein name |
| P02768 | NAB | Serum albumin GN = ALB |
| P0CG05 | ABP | Ig lambda-2 chain C regions GN = IGLC2 |
| P06702 | | Protein S100-A9 GN = S100A9 |
| P08238 | | Heat shock protein HSP 90-beta GN = |
| | | HSP90AB1 |
| P60709 | CA/CK | Actin, cytoplasmic 1 GN = ACTB |
| P13647 | CA/CK | Keratin, type II cytoskeletal 5 GN = KRT5 |
| P01616 | ABP | Ig kappa chain V-II region MIL |
| Q86YZ3 | CA/CK | Hornerin GN = HRNR |
| P01857 | ABP | Ig gamma-1 chain C region GN = IGHG1 |
| P62805 | NAB | Histone H4 GN = HIST1H4A |
| P59665 | | Neutrophil defensin 1 GN = DEFA1 |
| P61626 | | Lysozyme C GN = LYZ |
| P01024 | ABP | Complement C3 GN = C3 |
| Q8TF72 | | Protein Shroom3 GN = SHROOM3 |
| P83593 | ABP | Ig kappa chain V-IV region STH (Fragment) |
| P01700 | ABP | Ig lambda chain V-I region HA |
| P01877 | ABP | Ig alpha-2 chain C region GN = IGHA2 |
| Q9UL12 | | Sarcosine dehydrogenase, mitochondrial |
| | | GN = SARDH |
| Q6NXT2 | NAB | Histone H3.3C GN = H3F3C |
| P02788 | NAB | Lactotransferrin GN = LTF |
| P02787 | ABP | Serotransferrin GN = TF |

[1014] Certain proteins were identified in multiple bands. For example, IGLC2 was identified in bands 3, 15 and 19 and SHROOM3 was identified in bands 7, 15, 19. This may be due to degradation products, isoforms or the like. These experiments identified 108 proteins (plus 2 lysozyme controls), comprising among others 34 Nucleic Acid Binding Proteins (NAB) where 7 of the 34 are putative tumor suppressors/repressors; 37 cell adhesion/cytoskeletal (CA/CK); and 14 abundant plasma proteins (ABP). All of the tumor suppressors/repressors are DNA/RNA binding proteins. Other proteins comprise chaperones, signaling molecules etc.

[1015] For comparison to the above pull-down results with the enriched L2 library, mass spectrometry was used to identify proteins in whole plasma samples (“neat plasma”) (Table 26, row “Neat”), in PEG enriched plasma fractions (comprising a microvesicle-containing fraction) (Table 26, row “PEG”), and in unenriched L0 library pull-down (Table 26, row “Unenriched”) using the same healthy (non-breast cancer) plasma samples as described above. Descriptions in the table comprise the gene name followed by accession numbers from the UniProt database (www.uniprot.org) in parentheses. 81 proteins were pulled down by L2(Tables 18-25) that were not detectable in the PEG-precipitated and neat plasma, indicating that these proteins became enriched due to their interaction with L2 oligonucleotide probes. Further details are found in Example 28 of International Patent Application PCT/US 15/62,184, filed Nov. 23, 2015, which application is incorporated by reference herein in its entirety.

TABLE 26
Proteins identified in plasma

| Accession | Description (Gene Name (Accession)) |
|---|---|
| Neat | ALB (P02768), C3 (P01024), APOB (P04114), TF (P02787), A2M (P01023), C4B |
| | (P0C0L5), C4A (P0C0L4), FGA (P02671), FGB (P02675), CP (P00450), IGKC (P01834), |
| | IGHG1 (P01857), HP (P00738), FGG (P02679), IGHG3 (P01860), CFH (P08603), GC |
| | (P02774), IGHG2 (P01859), SERPINA1 (P01009), ITIH4 (Q14624), SERPINC1 (P01008), |
| | IGHM (P01871), HPR (P00739), CFB (P00751), APOA1 (P02647), FN1 (P02751), IGLL5 |
| | (B9A064), PLG (P00747), A1BG (P04217), ITIH2 (P19823), SERPINA3 (P01011), KNG1 |
| | (P01042), IGHG4 (P01861), APOA4 (P06727), F2 (P00734), HPX (P02790), C4BPA |
| | (P04003), ITIH1 (P19827), IGHA1 (P01876), IGLC2 (P0CG05), SERPING1 (P05155), |
| | GSN (P06396), PON1 (P27169), AGT (P01019), APOH (P02749), HRG (P04196), APCS |
| | (P02743), AFM (P43652), IGHA2 (P01877), APOE (P02649), AHSG (P02765), |
| | SERPIND1 (P05546), C5 (P01031), AMBP (P02760), ORM1 (P02763), AZGP1 (P25311), |
| | KRT1 (P04264), CFI (P05156), HBB (P68871), CD5L (O43866), C9 (P02748), RBP4 |
| | (P02753), VTN (P04004), SERPINA6 (P08185), SERPINF2 (P08697), CLU (P10909), |
| | KRT2 (P35908), C1QC (P02747), TTR (P02766), Ig kappa chain V-II region TEW |
| | (P01617), Ig heavy chain V-III region BUT (P01767), Ig heavy chain V-III region TUR |
| | (P01779), APOA2 (P02652), ORM2 (P19652), CFHR1 (Q03591), PGLYRP2 (Q96PD5), |
| | LYZ (P00698), Ig kappa chain V-IV region Len (P01625), Ig heavy chain V-III region |
| | GAL (P01781), IGHD (P01880), C1QB (P02746), C8A (P07357), C8G (P07360), KRT10 |
| | (P13645), APOL1 (O14791), IGJ (P01591), KLKB1 (P03952), Ig lambda chain V region |
| | 4A (P04211), Ig kappa chain V-III region VG (Fragment) (P04433), HBA1 (P69905), |
| | APOM (O95445), C1R (P00736), F12 (P00748), Ig lambda chain V-III region SH |
| | (P01714), Ig lambda chain V-IV region Hil (P01717), Ig heavy chain V-III region WEA |
| | (P01763), Ig heavy chain V-II region NEWM (P01825), LRG1 (P02750), IGKV4-1 |
| | (P06312), PROS1 (P07225), PRSS1 (P07477), C7 (P10643), C6 (P13671), CPN2 |
| | (P22792), SERPINF1 (P36955), Ig lambda chain V-III region LOI (P80748), ABCF1 |
| | (Q8NE71), FCN3 (O75636), F10 (P00742), Ig heavy chain V-I region HG3 (P01743), Ig |
| | heavy chain V-III region HIL (P01771), Ig heavy chain V-II region OU (P01814), Ig kappa |
| | chain V-I region BAN (P04430), APOD (P05090), C2 (P06681), C8B (P07358), LPA |
| | (P08519), C1S (P09871), HIST1H1D (P16402), Ig heavy chain V-I region V35 (P23083), |
| | LGALS3BP (Q08380), ATF7IP (Q6VMQ6), RASSF6 (Q6ZTQ3), MTMR14 (Q8NCE2), |
| | DCHS1 (Q96JQ0), HIST1H2AH (Q96KK5), HMCN1 (Q96RW7), UPF3A (Q9H1J1), |
| | IGLC7 (A0M8Q6), UNC13B (O14795), APBA3 (O96018), GSN (P06396), C4A |
| | (P0C0L4), PZP (P20742), SERPINA4 (P29622), SHMT2 (P34897), KRT9 (P35527), |
| | SEPP1 (P49908), COG7 (P83436), ITIH3 (Q06033), TMEM198 (Q66K66), F13A1 |
| | (P00488), Ig kappa chain V-I region Lay (P01605), S100A6 (P06703), KRT5 (P13647), |
| | CDH2 (P19022), SAA4 (P35542), RXRG (P48443), ARFGEF3 (Q5TH69), IQCE |
| | (Q6IPM2), C19orf68 (Q86XI8), CELSR3 (Q9NYQ7), C1RL (Q9NZP8), SARDH |
| | (Q9UL12), MYH4 (Q9Y623) |
| PEG | C3 (P01024), A2M (P01023), APOB (P04114), IGKC (P01834), C4A (P0C0L4), C4B (P0C0L5), |
| | FGB (P02675), ALB (P02768), CFH (P08603), IGHG1 (P01857), FGA (P02671), FN1 (P02751), |
| | PLG (P00747), IGHM (P01871), FGG (P02679), TF (P02787), C5 (P01031), CP (P00450), IGHG2 |
| | (P01859), IGLC2 (P0CG05), Ig mu heavy chain disease protein (P04220), ITIH1 (P19827), PZP |
| | (P20742), IGHG3 (P01860), IGLL5 (B9A064), HP (P00738), C4BPA (P04003), ITIH2 (P19823), |
| | IGHA1 (P01876), KRT1 (P04264), KRT10 (Pl3645), APOE (P02649), Ig kappa chain V-I region |
| | DEE (P01597), AMBP (P02760), F2 (P00734), C7 (P10643), C6 (P13671), ITIH4 (Q14624), CFB |
| | (P00751), IGHG4 (P01861), APOH (P02749), APOA1 (P02647), CD5L (O43866), C1R (P00736), |
| | HPR (P00739), Ig kappa chain V-I region Scw (P01609), IGHA2 (P01877), CFHR1 (Q03591), |
| | KRT2 (P35908), Ig kappa chain V-III region SIE (P01620), HRG (P04196), Ig heavy chain V-III |
| | region BRO (P01766), C1QB (P02746), GC (P02774), Ig heavy chain V-III region TIL (P01765), Ig |
| | kappa chain V-III region NG9 (Fragment) (P01621), Ig heavy chain V-III region BUT (P01767), Ig |
| | heavy chain V-III region TUR (P01779), C9 (P02748), SERPIND1 (P05546), Ig kappa chain V-I |
| | region WEA (P01610), Ig kappa chain V-I region Ni (P01613), Ig kappa chain V-IV region Len |
| | (P01625), Ig kappa chain V-I region EU (P01598), Ig kappa chain V-II region TEW (P01617), Ig |
| | heavy chain V-III region GAL (P01781), KNG1 (P01042), VTN (P04004), C8B (P07358), Ig |
| | lambda chain V-III region LOI (P80748), Ig heavy chain V-II region NEWM (P01825), APCS |
| | (P02743), KLKB1 (P03952), CFI (P05156), PROS1 (P07225), LPA (P08519), KRT9 (P35527), |
| | SERPINA1 (P01009), Ig lambda chain V-III region SH (P01714), C8A (P07357), Ig kappa chain V- |
| | III region B6 (P01619), Ig lambda chain V-IV region Hil (P01717), Ig kappa chain V-III region CLL |
| | (P04207), C1S (P09871), FCN3 (O75636), SERPINC1 (P01008), Ig kappa chain V-I region Mev |
| | (P01612), IGHD (P01880), C1QC (P02747), HPX (P02790), C8G (P07360), IGKV1-5 (P01602), Ig |
| | kappa chain V-I region Wes (P01611), Ig heavy chain V-III region WEA (P01763), A1BG |
| | (P04217), GSN (P06396), FBLN1 (P23142), HBB (P68871), ITIH3 (Q06033), F12 (P00748), |
| | SERPINA3 (P01011), APOC3 (P02656), Ig kappa chain V-I region BAN (P04430), Ig kappa chain |
| | V-III region VH (Fragment) (P04434), F13B (P05160), IGKV4-1 (P06312), SERPINF2 (P08697), |
| | CLU (P10909), HIST1H1D (P16402), PON1 (P27169), IGJ (P01591), Ig kappa chain V-III region |
| | POM (P01624), Ig heavy chain V-III region CAM (P01768), Ig heavy chain V-III region BUR |
| | (P01773), Ig kappa chain V-III region VG (Fragment) (P04433), APOD (P05090), Ig lambda chain |
| | V-IV region MOL (P06889), Ig heavy chain V-III region GAR (P80419), FCGBP (Q9Y6R7), |
| | APOM (O95445), F13A1 (P00488), Ig heavy chain V-I region HG3 (P01743), C1QA (P02745), Ig |
| | lambda chain V-VI region WLT (P06318), C2 (P06681), C4BPB (P20851), CFP (P27918), |
| | SERPINA4 (P29622), SAA4 (P35542), SERPINF1 (P36955), LGALS3BP (Q08380), HABP2 |
| | (Q14520), RCBTB1 (Q8NDN9), APOL1 (O14791), KCNQ2 (O43526), F9 (P00740), Ig heavy |
| | chain V-III region TRO (P01762), Ig heavy chain V-III region HIL (P01771), Ig heavy chain V-II |
| | region OU (P01814), APOA2 (P02652), F11 (P03951), Ig lambda chain V-I region WAH (P04208), |
| | Ig lambda chain V region 4A (P04211), Ig kappa chain V-II region RPMI 6410 (P06310), Ig kappa |
| | chain V-III region IARC/BL41 (P06311), KRT5 (P13647), IGLL1 (P15814), Ig heavy chain V-I |
| | region V35 (P23083), HBA1 (P69905), ADIPOQ (Q15848), PGLYRP2 (Q96PD5), UPF3A |
| | (Q9H1J1), BCO1 (Q9HAY6), ARFGAP3 (Q9NP61), SARDH (Q9UL12), SERPINA1 (P01009), |
| | KNG1 (P01042), Ig kappa chain V-I region Kue (P01604), Ig kappa chain V-I region Lay (P01605), |
| | Ig kappa chain V-I region OU (P01606), Ig kappa chain V-II region MIL (P01616), Ig heavy chain |
| | V-III region VH26 (P01764), Ig heavy chain V-III region GA (P01769), FN1 (P027510), TTR |
| | (P02766), SERPING1 (P05155), APOA4 (P06727), PRSS1 (P07477), ANXA6 (P08133), CFTR |
| | (P13569), LBP (P18428), FBLN1 (P23142), SPAG17 (Q6Q759), PDLIM2 (Q96JY6), ARHGEF17 |
| | (Q96PE2), IGLC7 (A0M8Q6), AGRN (O00468), AGT (P01019), RBP4 (P02753), AHSG (P02765), |
| | Ig kappa chain V-III region GOL (P04206), SERPINA5 (P05154), GSN (P06396), Ig kappa chain |
| | V-III region HAH (P18135), CFHR2 (P36980), GIT2 (Q141611), INCENP (Q9NQS7 |
| Unenriched | LYZ (P00698), IGHG1 (P01857), KRT14 (P02533), KRT6A (P02538), APOA1 (P02647), |
| | FGA (P02671), ALB (P02768), HSPB1 (P04792), COL1A2 (P08123), KRT16 (P08779), |
| | IGLC6 (P0CF74), KRT5 (P13647), DSP (P15924), DSP (P15924), LGALS7 (P47929), |
| | ACTG2 (P63267), DCD (P81605), DSG1 (Q02413), FLG2 (Q5D862), SBSN (Q6UWP8), |
| | KRT73 (Q86Y46), HRNR (Q86YZ3), KRT78 (Q8N1N4), SHROOM3 (Q8TF72), TREX2 |
| | (Q9BQ50), SPATA7 (Q9P0W8) |

[1016] The methods above were further repeated to identify proteins that were identified in cancer samples using pull-down with the L1 library. Proteins identified in these experiments include MUC5B (Q9HC84), FABP5 (Q01469), HPX (P02790), CP (P00450), SPRR2E (P22531), SPRR2D (P22532), PDE4D (Q08499-7), GC (P02774-2), CPD (075976), CD14 (P08571), LAP3 (P28838-2), AFM (P43652), FCN2 (Q15485-2), DMBT1 (Q9UGM3-9), LIFR (P42702), SNX27 (Q96L92-3), LCN1 (P31025), ARFIP1 (P53367-2), APOH (P02749), KLKB1 (P03952), XP32 (Q5T750), H2AFV (Q71UI9-5), KRT75 (095678), KRT6C (P48668), KRT83 (P78385), KRT76 (Q01546), KRT33B (Q14525), KRT72 (Q14CN4-3), KRT31 (Q15323), KRT73 (Q86Y46-2), DSG1 (Q02413-2), LCE1C (Q5T751), LCE1A (Q5T7P2), CFB (P00751), CFH (P08603), SERPINA1 (P01009-2), Ig kappa chain V-I region EU (P01598), Ig kappa chain V-II region MIL (P01616), Ig lambda chain V-IV region Bau (P01715), Ig heavy chain V-III region GAL (P01781), IGLC6 (POCF74) and ACTG2 (P63267-2). Accession numbers in parentheses are from the UniProt database (www.uniprot.org).

[1017] The biomarkers in this Example can be used to detect microvesicles that are indicative of cancer or non-cancer samples.

### Example 24: Identification of Biomarkers Through Affinity Enrichment with an Enriched Oligonucleotide Library and Mass Spectrometry

[1018] This Example continues upon the Example above. Identification of protein-protein and nucleic acid-protein complexes by affinity purification mass spectrometry (AP-MS) can be hampered in samples comprising complex mixtures of biological components (e.g., bodily fluids including without limitation blood and derivatives thereof). For example, it may be desireable to detect low abundance protein and nucleic acid-protein complexes in a complex milieu comprising various components that may interact promiscuously with specific binding sites such as high abundance proteins that interact non-specifically with the affinity resin. AP-MS has been used previously to enrich for pre-identified targets of interest using individual DNA or RNA aptamers or specific nucleic acid binding domains. In this Example, an enriched oligonucleotide probing library was used as the affinity reagent. This approach combined with mass spectrometry enables the identification of differentially expressed biomarker from different disease states or cellular perturbations without relying on a priori knowledge of the targets of interest. Such biomarker may comprise proteins, nucleic acids, miRNA, mRNA, carbohydrates, lipid targets, combinations thereof, or other components in a biological system.

[1019] The method comprises identification of an enriched oligonucleotide probe library according to the methods of the invention followed by target identification with affinity purification of the bound probing library and mass spectrometry. The members of the enriched oligonucleotide probing library comprise an affinity tag. A biological sample is probed with the oligonucleotide probe library, affinity purification of the oligonucleotide probe library via the affinity tag is performed which will accordingly purify biological entities in complex with various members of the probe library, and read-out of targets that purified with the members of the probe library is performed using liquid chromatography-tandem mass spectrometry (LC-MS/MS) for proteins or oligonucleotide targets (e.g., miRNA or mRNA) with next generation sequencing (NGS). Confirmation of protein targets is performed using quantitative mass spectrometry (MS), e.g., using MRM/SRM or SWATH based methods.

[1020] The method of the Example lends itself to various options. For example, any appropriate affinity tags can be used for affinity pull-down, including without limitation anti-sense oligonucleotides, biotin, polyhistidine, FLAG octapeptide (i.e., N-DYKDDDDK-C(SEQ ID NO. 134), where N stands for Amino-terminus and C stands for Carboxy terminus), 3×FLAG, Human influenza hemagglutinin (HA)-tag (i.e., N-YPYDVPDYA-C(SEQ ID NO. 135)), myc-tag (N-EQKLISEEDL-C(SEQ ID NO. 136)), other such as known in the art, and combinations thereof. Similarly, any appropriate enrichment support can be used in addition to the magnetic streptavidin beads exemplified herein, including without limitation other bead systems, agarose beads, planar arrays or column chromatography supports. It follows that the various supports can be coupled with the various affinity reagents appropriate for the oligonucleotide library, including without limitation streptavidin, avidin, anti-His tag antibodies, nickel, and the like. The different affinity tags and supports can be combined as desired. This Example used cross-linking but in certain cases such cross-linking is not necessary and may even be undesirable, e.g., to favor identification of high affinity complex formation. When cross-linking is desired, any appropriate cross-linkers can be used to carry out the invention, including BS2G, DSS, formaldehyde, and the like. Other appropriate cross-linkers and methods are described herein. See, e.g., Section “Aptamer Target Identification.” Lysis buffers and wash stringencies can be varied, e.g, depending on whether complexes are cross-linked or not. Less stringent lysis/wash conditions may produce a wider array of potential protein complexes of interest whereas more stringent lysis/wash conditions may favor higher affinity oligo-target complexes and/or targets comprising specific proteins (e.g., by disassociating larger complexes bound to the oligos). One of skill will further appreciate that qualitative and/or quantitative LC-MS/MS may be used for target detection and verification. Similarly, metabolic labeling and label-free approaches may be used for quantitative MS, including without limitation spectral counting, SILAC, dimethyl labeling, TMT labeling, Targeted MS with SRM/MRM or SWATH, and the like.

### References

[1021] Vickenborg et al. “Aptamer based affinity labeling of proteins”, Angew Chem Int. 51(36):9176-80(2012).
[1022] Tacheny, M, Arnould, T., Renard, A. “Mass spectrometry-based identification of proteins interacting with nucleic acids”, Journal of Proteomics 94; 89-109 (2013).
[1023] Faoro C and Ataide S F. “Ribonomic approaches to study the RNA-binding proteome.”, FEBS Lett. 588(20):3649-64 (2014).
[1024] Budayeva H G, Cristea, I M, “A mass spectrometry view of stable and transient protein inteeractions.” Adv Exp Med Biol. 806:263-82 (2014).

### Example 25: Protocol for Affinity Capture Using Oligonucleotide Probing Library

[1025] This Example presents a detailed protocol for the method of affinity capture using an oligonucleotide probing library presented in the Example above.

[1026] Protocol:

[1027] The oligonucleotide probe library comprises F-TRin-35n-B-8-3s described herein either desthiobiotin labeled or unlabeled library and binding to normal (i.e., non-cancer) female plasma. The oligonucleotide probe library is enriched against the plasma samples as described elsewhere (e.g., in Example 21). The plasma samples are processed separately against the desthiobiotin labeled or unlabeled oligonucleotide libraries. General parameters included the following:

[1028] 48 normal plasma samples are pooled for enrichment of each oligonucleotide library (Desthiobiotin or Unlabeled)

[1029] 200 μl input plasma per sample

[1030] Ultracentrifugation (UC) is used to pre-clear the samples

[1031] 5 ng of each aptamer library is added to each sample

[1032] Binding competitors for all library samples include 0.01×S1 (dextran sulfate), 340 ng for tRNA and 340 ng Salmon sperm DNA as described elsewhere herein

[1033] 6% PEG 8000 is used for precipitation of microvesicles within the samples

[1034] Affinity purification is performed with C1 Streptavidin beads (MyOne streptavidin Beads C1-65001, lot 2 ml (10 mg/ml))

[1035] Buffers:

[1036] Plasma dilution: 6 mM MgCl2 in 2×PBS

[1037] Pellet Wash Buffer: 1×PBS, 3 mM MgCl2

[1038] PEG Ppt Buffer: 20% Peg8000 in 1×PBS, 3 mM MgCl2

[1039] Bead Prep Buffer: 1×PBS containing 0.01% Triton X-100

[1040] Lysis Buffer: prepare a 2× stock solution consisting of 100 mM Tris-HCl, 20 mM MgCl2, 400 mM NaCl, 1% Triton X-100, 10% glycerol, pH 7.5. Diluted to 1× with water 1:1 prior to using.

[1041] AP Wash buffer 1: 10 mM Tris-HCl, 1 mM EDTA, 2M NaCl, 1% Triton X-100, pH 7.5

[1042] AP wash buffer 2: 10 mM Tris-HCL, 1 mM EDTA, 2M NaCl, 0.01% Triton X-100, pH 7.5

[1043] Biotin Elution buffer 1: 5 mM Biotin, 20 mM Tris, 50 mM NaCl, pH 7.5

[1044] 1×LDS, 1× Reducing buffer 2

[1045] Reagent/Instrument Prep:

[1046] Pre-chill Ultracentrifuge to 4° C.

[1047] Protease inhibition: dissolve 2 tablets of “cOmplete ULTRA MINI EDTA-free EASYpack” protease inhibitor in 1100 μl of H2O (20× stock of protease inhibitor).

[1048] Plasma Preparation (for each of Desthiobiotin or Unlabeled oligonucleotide libraries):

[1049] 1. Add 50 μl of protease inhibitor to each ml of sample (on top of frozen plasma) in a room temperature (RT) water bath. Will use 22 mls of pooled plasma, so 1100 μl inhibitor.

[1050] 2. To remove cell/debris, spin samples at 7500×g 20 min, 4° C. in the Ultracentrifuge.

[1051] 3. Collect the supernatant, pool and measure volume & record

[1052] 4. Add an equal volume of 2×PBS, 6 mM MgCl₂ to the plasma.

[1053] 5. Label low-retention eppendorf tubes 1-96.

[1054] 6. Transfer 400 μl of each sample to eppendorf tubes based on appropriate tube map

[1055] 7. Using an electronic P200, add competitors: 8.6 μl of 40 ng/μl Salmon sperm DNA; 8.6 μl of 40 ng/μl tRNA; 8.6 μl of 0.5×S1.

[1056] 8. Incubate at RT with end over end rotation for 10 min.

[1057] 9. Add 10 μL of appropriate oligo library, mix well. Save any leftover diluted library for gel control (see below).

[1058] 10. Incubate 1 hr at RT with end over end rotation.

[1059] 11. Using an electronic repeat P100, add 187 μl of 20% PEG 8000 to sample for a final 6% concentration to the 435.5 μl of sample/oligo library. Invert a few times to mix and incubate for 15 min at 4° C.

[1060] 12. Spin each sample in table top centrifuge at 10,000×g for 5 min.

[1061] 13. Remove supernatant and discard, add 1 ml 1×PBS, 3 mM MgCl₂ to pellet.

[1062] 14. Wash pellet by gentle inversion

[1063] 15. Remove buffer, re-suspend pellets in 100 μl 1×PBS, 3 mM MgCl₂: incubate at RT for 10 min on mixmate @ 900 rpm to re-suspend. Make sure each sample is well re-suspended by pipetting.

[1064] 16. Pool all desthiobiotin library samples into one 50 ml falcon tube, and the unlabeled library into another, total volume for each should be 4800 μl.

[1065] 17. Take 10 μL aliquot for the input into AP sample for gel (add 10 μL of 2×LDS buffer w/2× reducing agent.

[1066] Affinity Purification:

[1067] 18. Prepare 10 μL of MyOne Strep-coated Magnetic beads per each condition into a 1.5 ml eppendorf tube and place on a magnetic bead rack. Have a Bead only control as well (n=3)

[1068] 19. Remove supernatant and wash 1×500 μl with Bead buffer.

[1069] 20. Discard supernatant

[1070] 21. Resuspend beads in an equal volume of 1×PBS, 3 mM MgCl₂ (equal vol to what was taken out originally=10 μl)

[1071] 22. Add the 10 μl of beads directly to the 4780 μL from step 19. To Bead only control add PBS.

[1072] 23. Incubate samples with streptavidin beads 1 hr RT on plate shaker (taped).

[1073] 24. Place on the large magnetic stand for 1 min and remove supernatant

[1074] 25. Add 1.5 mL of 1× lysis buffer to the samples (do 3×500 μl with a good rinse of the 50 mL falcon tube for each to collect all the beads) and transfer to a new set of eppendorf tubes.

[1075] 26. Incubate for 20 min on ice.

[1076] 27. Place tubes in magnetic bead rack, let equilibrate 1 min and remove the supernatant.

[1077] 28. Wash the beads with wash buffer #1 via vortexing. Resuspend well.

[1078] 29. Place tubes on magnetic bead rack, let equilibrate 1 min and remove the supernatant

[1079] 30. Wash 2 additional times as with wash buffer #1 steps 27-29 (total 3 washes with wash buffer #1)

[1080] 31. Repeat steps 27-29 (2) additional times with wash buffer #2

[1081] 32. During the last wash transfer beads to a new eppendorf tube. (to reduce non-specific binding)

[1082] 33. Do one dry spin to make sure all residual wash buffer is removed.

[1083] 34. Add 10 μl of Biotin Elution buffer 1 to beads

[1084] 35. Incubate for 15 minutes at 37° C.

[1085] 36. Place on magnetic stand for 1 min, collect sup and transfer to a new tube, add 10 μL of 2×LDS, 2× Reducing agent to eluted sample. Save as Elution #1.

[1086] 37. Add 10 μl of 1×LDS Sample Buffer, 1× Reducing buffer to magnetic beads.

[1087] 38. Boil the samples for 15 min at 90° C. The boiling time is 15 minutes to assure the streptavidin on the beads unfolds and releases the biotinylated aptamer-protein complex.

[1088] 39. Place samples on magnetic stand on ice and collect the eluted sample. This is Elution #2. Discard the beads.

[1089] 40. Gel 1 layout:
[1090] Lane 1: 5 ng Desthiobiotin library
[1091] Lane 2: 1×LDS
[1092] Lane 3: Marker
[1093] Lane 4: Desthiobiotin Elution #1
[1094] Lane 5: Unlabeled Elution #1
[1095] Lane 6: Bead only Elution #1
[1096] Lane 7: Desthiobiotin Elution #2
[1097] Lane 8: Unlabeled Elution #2
[1098] Lane 9: Bead only Elution #2
[1099] Lane 10: Input for AP (saved from step 17)

[1100] Running Reducing SDS Gel:

[1101] Prepare 1×MOPS SDS Running Buffer from 20×MOPS SDS Buffer

[1102] Use 10 or 12 well 4-12% Bis Tris gel

[1103] Peel off tape seal and place in the gel box. Insert spacer for second gel cassette if needed

[1104] Fill the inside/upper chamber with running buffer MOPS (1×) and 500 ul Antioxidant

[1105] Remove the comb carefully, not disturbing the wells

[1106] Rinse the wells with the running buffer to remove the storage buffer which can interfere with sample running

[1107] Slowly load samples to each well carefully using L-20 tip

[1108] Fill the outer/lower chamber with approximately 600 ml of running buffer MOPS (1×)

[1109] Place top portion of unit and secure correct electrodes

[1110] Run the gel to migrate proteins

[1111] 100 V constant for samples to move through stack (until all samples line up) for 15 min

[1112] Increase to 150 V constant for running (until visible sample buffer comes to bottom) for ˜1 hr

[1113] At the end of the run, stop the power supply and remove the gel cassettes from cell

[1114] Disassemble the gel cassette by with gel knife.

[1115] Remove one side of cassette case. Trim off the gel foot and wells (avoid drying gel).

[1116] Transfer gel into container filled with Mili Q water and perform a quick wash.

[1117] Silver Staining:

[1118] Materials:

[1119] ProteoSilver TMSilver Stain Kit, Sigma Catalog No. PROT-SIL1, Lot No. SLBJ0252V

[1120] Ethanol, Fisher Scientific Catalog No. BP2818-4, Lot No. 142224

[1121] Acetic acid, Acros organics Catalog No. 14893-0025, Lot No. B0520036

[1122] Water, Sigma Catalog No. W4502, Lot No. RNBD1581

[1123] Preparation:

[1124] 1. Fixing solution. Add 50 ml of ethanol and 10 ml of acetic acid to 40 ml of ultrapure water.

[1125] 2. 30% Ethanol solution. Add 30 ml of ethanol to 70 ml of ultrapure water.

[1126] 3. Sensitizer solution. Add 1 ml of ProteoSilver Sensitizer to 99 ml of ultrapure water. The prepared solution should be used within 2 hours. A precipitate may form in the ProteoSilver Sensitizer. This precipitate will not affect the performance of the solution. Simply allow the precipitate to settle and remove 1 ml of the supernatant.

[1127] 4. Silver solution. Add 1 ml of ProteoSilver Silver Solution to 99 ml of ultrapure water. The prepared solution should be used within 2 hours.

[1128] 5. Developer solution. Add 5 ml ProteoSilver Developer 1 and 0.1 ml ProteoSilver Developer 2 to 95 ml of ultrapure water. The developer solution should be prepared immediately (<20 minutes) before use.

[1129] 6. All steps should be carried out in the hood and waste needs to be collected in toxic designated container.

[1130] Procedure

[1131] A. Direct Silver Staining

[1132] All steps are carried out at room temperature on an orbital shaker at 60 to 70 rpm.

[1133] 1. Fixing—After electrophoresis of the proteins in the mini polyacrylamide gel, place the gel into a clean tray with 100 ml of the Fixing solution overnight in the hood. Cover tightly.

[1134] 2. Ethanol wash—Decant the Fixing solution and wash the gel for 10 minutes with 100 ml of the 30% Ethanol solution.

[1135] 3. Water wash—Decant the 30% Ethanol solution and wash the gel for 10 minutes with 200 ml of ultrapure water.

[1136] 4. Sensitization—Decant the water and incubate the gel for 10 minutes with 100 ml of the Sensitizer solution.

[1137] 5. Water wash—Decant the Sensitizer solution and wash the gel twice, each time for 10 minutes with 200 ml of ultrapure water.

[1138] 7. Silver equilibration—Decant the water and equilibrate the gel for 10 minutes with 100 ml of the Silver solution.

[1139] 8. Water wash—Decant the Silver solution and wash the gel for 1 to 1.5 minutes with 200 ml of ultrapure water.

[1140] 9. Gel development—Decant the water and develop the gel with 100 ml of the Developer solution. Development times of 3 to 7 minutes are sufficient to produce the desired staining intensity for most gels. Development times as long as 10 to 12 minutes may be required to detect bands or spots with very low protein concentrations (0.1 ng/mm2).

[1141] 10. Stop—Add 5 ml of the ProteoSilver Stop Solution to the developer solution to stop the developing reaction and incubate for 5 minutes. Bubbles of CO₂ gas will form in the mixture.

[1142] 11. Storage—Decant the Developer/Stop solution and wash the gel for 15 minutes with 200 ml of ultrapure water. Store the gel in fresh, ultrapure water and take picture for documentation.

[1143] Protein Identification

[1144] Protein bands of interest were excised from the gradient gels and subjected to liquid chromatography-tandem mass spectrometry (LC-MS/MS) as above.

### Example 26: Oligonucleotide Probes: Breast Cancer Versus Non-Cancer

[1145] This Example presents breast cancer oligonucleotide probes identified in a library enriched against balanced fractions pool of plasma-derived microvesicles from patients with 50% aggressive cancer. General methodology is as presented in Example 21 above. The samples comprised pools of 30 each of breast cancer patient plasma and healthy plasma (i.e., non-cancer controls). A set of cancer specific aptamers was identified where each aptamer has a fold change exceeding two when compared to either the healthy plasma pool (normal and non-cancer) or process control (no negative selection enriched library).

[1146] Methodology

[1147] The F-TRin-35n-B 8-3s library as described herein was enriched against microvesicles from the plasma samples. See Example 21 with the modifications noted below. The screened library comprised a 5′ region (5′ CTAGCATGACTGCAGTACGT 3′ (SEQ ID NO. 131)) followed by the random naïve aptamer sequences and a 3′ region (5′ CTGTCTCTTATACACATCTGACGCTGCCGACGA (SEQ ID NO. 132)).In the previous enrichment protocol in Example 21, positive, negative and positive selections were performed before each cycle of PCR to re-amplify the library. But in the current enrichment protocol, the aptamer library was purified with streptavidin beads after each selection and the beads were directly used for PCR amplification. Also as compared to prior experiments, the new sample pool for aptamer enrichment was balanced for different plasma fractions and collection vial for each of cancer, non-cancer and normal patients. Specifically, plasma was initially collected in 4 tubes from each patient, each of those 4 tubes were split into 3 aliquots, resulting in 12 aliquots from each patient. For example, a 1st tube out of the 4 results in aliquots 1A, 1B and 1C, the same split is repeated for the other three aliquots, which results in 12 aliquots from each patient (1A-C, 2A-C, 3A-C, 4A-C). Correspondingly, a pool of 60 patients consists of each variant repeated 5 times (5×12). Enrichment was done according to the selection methodology outlined above, where the library was PCR amplified after each binding round for 7 rounds, which include 3 positive selections against cancer-derived samples, 3 negative selections against controls, and a final positive selection. The enriched library was subjected to the probing test on cancer and healthy pools of plasma samples. There was a subset of 296 cancer specific aptamers, which have a relatively higher read count and fold change >2 as compared to healthy pool and process control. The detailed protocol is as follows:

[1148] Equipment & Supplies

[1149] 1×PBS (HiClone): SH30256.01, Lot #: AZC186921, bottle #1476, exp. May/2016. Supplemented with 3 mM MgCl₂ (4227844, USB) in steps 6, 7, 11.

[1150] Table Top centrifuge: 0363

[1151] 20×S1: Aptamer Science TT 070214, LN: 14F-01-S1, exp. 2015-06

[1152] PEG8000-lot #SLBJ9928V cat #91458, protease inhibitor Ref—05892791, Water—ref 10977-015, lot #1606173

[1153] 2×PBS+6 mM MgCl₂-PBS (Sigma)-SLBK2636V, Water—RNBD2918, MgCl₂-4227844 (USB). Used in steps: 5, 9.

[1154] Stock yeast tRNA (Ambion)—lot #1406019. Salmon DNA (Invitrogen)—lot #1617974

[1155] Starting solution comprises 5 ng Non-Enriched F-Trin-35n-B aptamer library, 300 ul of plasma, 0.01×S1+0.8 ng/ul Salmon DNA/tRNA (competitor DNAs), 6% PEG8000 (to precipitate microvesicles); final volume 600 ul.

[1156] Round 1 (1st Positive Enrichment)

[1157] Step 1: Pre-chill tabletop centrifuge at 4° C.

[1158] Step 2: Protease inhibition: dissolve 1 tablet of “cOmplete ULTRA MINI EDTA-free EASYpack” protease inhibitor in 550 ul of H2O (20× stock of protease inhibitor).

[1159] Step 3: Add 50 ul of protease inhibitor to the sample (on top of frozen plasma) and start thawing: 1 ml total ea.

[1160] Step 4: Cell spin: To remove cells/debris, spin samples at 10,000×g, 20 min, 4° C. Collect the entire volume of supernatant (SN) without disturbing the pellet.

[1161] Step 5: Mix SN from step 4 with equal volume of 2×PBS 6 mM MgCl₂, collect 600 ul ea into 2 ml Fisher Low binding tubes for use in step 6. Store remaining sample at 4° C. for the following rounds.

[1162] Step 6: Blocking: Add competitors in order: 1) Salmon DNA Stock; 2) tRNA; 3) S1. Make dilutions to desired concentration (see starting solution above) in 1×PBS, 3 mM MgCl2, mix well. Incubate for 10 min at room temperature (RT), end-over-end rotation.

[1163] Step 7: Binding: Add ssDNA Probing library to the final concentration 12.5 μg/ul for binding. Make dilutions in 1×PBS, 3 mM MgCl₂.

[1164] Step 8: Precipitation: Add buffer (20% PEG8000 in 1×PBS with 3 mM MgCl₂) to sample to the final PEG concentration 6%.

[1165] Step 9: Spin at 10,000×g for 5 min, RT.

[1166] Step 10: Wash: Remove SN, add 1 ml 1×PBS, 3 mM MgCl2 and wash pellet by gentle invertion with 1 ml aptamer buffer.

[1167] Step 11: Resuspension: Remove buffer, Re-suspend pellets in 200 ul H2O: incubate at RT for 10 min on mixmate 900 rpm. Ensure each sample is re-suspended by pipetting after step 11.

[1168] Step 12: Purification: Aptamers elution from PEG/Protein pellet with Streptavidin beads (Dynabeads #65001: Dynabeads® MyOne™ Streptavidin C1):
[1169] Beads stock: 10 mg/ml; Capacity: >2,500 pmoles/mg;
[1170] 10 ul beads should bind 250 pmoles Biotin
[1171] 3 ul beads for each aptamer library (AL) sample can bind 75 pmoles Biotin
[1172] Library input in the protocol above is ˜5 ng, which is 0.17 pmol
[1173] 12.1) Pre-washing Streptavidin Magnetic Beads:
[1174] 12.1.1 Add 10 uL of Streptavidin Magnetic Beads into 1.5 mL microcentrifuge tube (3 ul×2 samples+overage)
[1175] 12.1.2 Place the tube into a magnetic stand to collect the beads against the side of the tube. Remove and discard the supernatant.
[1176] 12.1.3 Add 0.5 mL of Wash Buffer (1×PBS with 0.1% Tween 20) to the tube. Invert the tube several times or vortex gently to mix. Collect the beads with a magnetic stand, then remove and discard the supernatant.
[1177] 12.1.4 Wash once with 0.5 ml 1×PBS, collect the beads with a magnetic stand, then remove and discard the supernatant.
[1178] 12.1.5 Add 35 ul 1×PBS to tubes. Aliquot into 10 ul per well (using repeater pipet) in 1.5 ml Fisher low-binding tubes. Add 40 ul of 1×PBS.
[1179] 12.2) Incubate 100 ul of sample, recovered in step 12, at 50° C. for 10 min (mixmate, 500 rpm) (to denature/remove protein/PEG from aptamer library)
[1180] 12.3) Sample Binding:
[1181] 12.3.6 Add heat denatured samples to beads (aliquoted in step 5).
[1182] 12.3.7 Incubate for 30 min, 37° C., mixmate at 800 rpm. Spin down at 2000 rpm for 20 sec.
[1183] 12.3.8 Collect the beads (with bound aptamers) using magnet and remove the supernatant by multichannel pipet.
[1184] 12.3.9 Take tubes off the magnet, add 300 ul of 1×PBS, pipet well. Collect the beads with magnetic stand, then remove supernatant.
[1185] 12.3.10 Add 100 ul H2O to resuspend beads by multichannel pipet.
[1186] 12.3.11 Block the beads with Biotin: add 7.5 ul from 10 uM stock, incubate 15 min, RT, 800 rpm.
[1187] 12.3.12 Collect the beads (with bound aptamers) using magnet and remove the supernatant by multichanel pipet. Take tubes off the magnet, add 200 ul of 1×PBS, pipet well. Collect the beads with magnetic stand, then remove supernatant.
[1188] 12.3.13 Add 100 ul H2O

[1189] Step 13: Use beads with bound aptamer library directly in re-AMP PCR (3×33 ul)

[1190] Step 14: Agarose gel
[1191] SYBR Gold gel lot #: H204044-01
[1192] 2 ul of sample+8 ul of loading buffer. Run for 10 cycles
[1193] If no dsDNA bands appear, run additional 3 cycles
[1194] Optional: if PCR product has non-specific bands, perform gel cut.

[1195] Step 15: dsDNA purification with Nucleospin column (NTI binding buffer):
[1196] 2× volume of buffer NTI per sample volume (600 ul NTI to 300 ul sample)
   [1197] combine 3 wells per column
   [1198] 5 min elution in 30 ul NE buffer, RT. Add 20 ul of NE after elution.

[1199] Step 16: Optional: Gel, SybrGold, Agarose: to verify product with correct size is observed

[1200] Step 17: Quantify dsDNA (QuBit, Life Technologies) (keep 5 ul of dsDNA as control for gel later)

[1201] Step 18: Lambda digestion at 37 C for 2 h; heat inactivation at 80 C for 10 min.

[1202] Step 19: ssDNA purification with Nucleospin column (NTC binding buffer).
[1203] combine 3 samples per column
[1204] elution: 5 min in 30 ul NE buffer, RT

[1205] Step 20: Quantify dsDNA (QuBit, Life Technologies) ssDNA (5 ul)

[1206] Step 21: Gel ssDNA: load between 2 ng and 10 ng

[1207] Round 2 (2d Positive Enrichment)

[1208] Repeat protocol starting from step 6 above, using diluted plasma samples stored in step 5. All steps are the same except for step 7. Input of library is 5 times less

[1209] Step 7: Binding: Add ssDNA Probing library to the final concentration 2.5 μg/ul for binding. Make dilutions in 1×PBS, 3 mM MgCl2.

[1210] Steps 6-13: As above. Use entire 100 ul of re-suspended sample to re-amplify via PCR

[1211] Steps 14-20: ssDNA preparation as above.

[1212] Round 3 (3rd Positive Enrichment)

[1213] Repeat steps as shown for round 2

[1214] Round 4 (Negative Enrichment)

[1215] Make sure to use correct negative samples (e.g., non-cancer sample in the case of positive cancer selection above, or vice versa)

[1216] Steps 1-9: Repeat as in Round 2 above (ssDNA input is 2.5 μg/ul).

[1217] Step 10: Collect SN (900 ul) and discard pellet after PEG precipitation.

[1218] Step 11: Resuspension: Not needed in this step

[1219] Step 12: Purification: Aptamers elution from PEG/Protein pellet with Streptavidin beads (Dynabeads #65001: Dynabeads® MyOne™ Streptavidin C1):
[1220] Beads stock: 10 mg/ml; Capacity: >2,500 pmoles/mg;
[1221] 10 ul beads should bind 250 pmoles Biotin
[1222] 3 ul beads for each AL sample can bind 75 pmoles Biotin
[1223] Library input in the protocol above is ˜5 ng, which is 0.17 pmol
   [1224] CHANGE FOR SN->For each sample, split 900 ul SN collected in step 10 above into two aliquots 450 ul ea, consider 3 ul of beads per each aliquot.
[1225] 12.1) Pre-washing Streptavidin Magnetic Beads:
[1226] 12.1.1 Add 30 uL of Streptavidin Magnetic Beads into 1.5 mL microcentrifuge tube. Four samples make 8 aliquots (for beads treatment)×3 ul beads+overage.
[1227] 12.1.2 Place the tube into a magnetic stand to collect the beads against the side of the tube. Remove and discard the supernatant.
[1228] 12.1.3 Add 0.5 mL of Wash Buffer (1×PBS with 0.1% Tween 20) to the tube. Invert the tube several times or vortex gently to mix. Collect the beads with a magnetic stand, then remove and discard the supernatant.
[1229] 12.1.4 Wash 1 time with 0.5 ml 1×PBS, collect the beads with a magnetic stand, then remove and discard the supernatant.
[1230] 12.1.5 Add 105 ul 1×PBS to tubes. Aliquot into 10 ul per well (using repeater pipet) in 1.5 ml Fisher low-binding tubes. Add 40 ul of 1×PBS.
[1231] 12.2) Incubate 900 ul of sample, recovered in step 10, at 50° C. for 10 min (mixmate, 500 rpm) (to denature/remove protein/PEG from aptamer library)
[1232] 12.3) Sample Binding:
[1233] 12.3.6 Add 1/2 (450 ul) heat denatured samples to beads (aliquoted in step 5).
[1234] 12.3.7 Incubate for 30 min, 37° C., end-over-end rotation. Spin down at 2000 rpm for 20 sec.
[1235] 12.3.8 Collect the beads (with bound aptamers) using magnet and remove the supernatant by multichanel pipet.
[1236] 12.3.9 Take tubes off the magnet, add 300 ul of 1×PBS, pipet well. Collect the beads with magnetic stand, then remove supernatant.
[1237] 12.3.10 Add 100 ul H2O to resuspend beads by multichanel pipet.
[1238] 12.3.11 Block the beads with Biotin: add 7.5 ul from 10 uM stock, incubate 15 min, RT, 800 rpm.
[1239] 12.3.12 Collect the beads (with bound aptamers) using magnet and remove the supernatant by multichanel pipet. Take tubes off the magnet, add 200 ul of 1×PBS, pipet well. Collect the beads with magnetic stand, then remove supernatant.
[1240] 12.3.13 Add 100 ul H2O per purification sample (total 200 ul per negative enrichment sample)
[1241] 12.3.14 Split each sample into 3 aliquots (33 ul each), this results into 6 wells per enrichment sample.

[1242] Step 13: Perform PCR

[1243] Rounds 5, 6: same as round 4

[1244] Round 7: repeats steps as shown for round 2

[1245] Results

[1246] FIGS. 14A-B are scatter plots showing high correlation of frequencies between replicates of cancer pool (FIG. 14A) and appearance of cancer specific subset of aptamers when cancer and healthy pools are compared (circled region in FIG. 14B). FIGS. 14C-F are scatter plots showing the appearance of cancer specific subset of aptamers when the cancer pool profile of the enriched library (i.e., C-RN7) was compared to the cancer pool of the process control library (CP; FIG. 14C) and healthy pool profile of process control library (HP; FIG. 14D). We did not observe a similar subset when the healthy pool profile (C-RN7 v HP) of the enriched library was compared to both variants of profile of process control (FIGS. 14E-F, see points along x-axis).

[1247] Selections of aptamer sequences identified in the enrichment screening are shown in Tables 27-29. In these tables, each complete aptamer sequence is assembled from 5′ to 3′ as a 5′ region, the variable region, and 3′ region. The sequences are shown 5′ to 3′ from left to right, wherein each complete sequence consists of a 5′ leader sequence 5′-CTAGCATGACTGCAGTACGT (SEQ ID NO. 131) followed by the indicated Variable Region sequence followed by the 3′ tail sequence 5′-CTGTCTCTTATACACATCTGACGCTGCCGACGA (SEQ ID NO. 132).The top 50 cancer specific sequences are shown in Table 27, each having a relatively high copy number in these experiments and a cancer/normal copy number ratio of at least 2-fold higher in the cancers. Table 28 comprises 25 sequences with mid-level copy number and a cancer/normal copy number difference of 0.8-1.2-fold. Table 29 shows a selection of 25 more sequences with low copy numbers and cancer/normal copy number ratio of ˜1.0 i.e. no significant difference).

TABLE 27
Cancer-Specific Sequences

| SEQ ID | |
|---|---|
| NO. | Variable Region |
| 137 | AACCCGCGTGATTGGGGTACTGCCCATGCGACTTT |
| 138 | AACTGAAGGCCAATTAAACTCCACTGTGCTAATCT |
| 139 | ACATGCCGGCGTTGATACTCTACTGTGCTCCATTATGA |
| 140 | AGACATGCCACGCCCTTTACATACTCCACTGTGCCA |
| 141 | AGCCACGCAGACCTATCTCTACTGTGCCAATGTT |
| 142 | AGGTACGTAAGGCTGCCATTACTCTCTACTGTGCCGA |
| 143 | AGTCTAGCGATCGACTTTTCTCTACGGTGCCCTTC |
| 144 | AGTGTGCGCATGAATCCATTACTCCACTGTGCCTTGA |
| 145 | AGTTGCAGACCCTTGTATTCTCTACCGTGCCCTATGA |
| 146 | CACTGCTAACTGATATTGTTGAACTCCACCGTGC |
| 147 | CATGCGACAAGCTTCCATTAACCATCCGCTATTTATGA |
| 148 | CATGCGGACCACGCTTTCACAAACTCATGATTCAAA |
| 149 | CATGCGTACGTCCTATTCTCTCTACTGTGCATTAA |
| 150 | CCTGCAATGCGGAAACCCTTCTACTCTACTGTGCC |
| 151 | CGCGAGCCAGGGTACTGCCTGCGGTCTAAACAATCA |
| 152 | CGTGCGACTTGTTCTCTACTGTGCCAATAAACCATA |
| 153 | GATAGCGCATATTCCTCTACTGTGCTACTTGTTAT |
| 154 | GCAAACCAATTAGTGTACCTCTACCGTGCCCAATGA |
| 155 | GCAACTACTCTCTACCGTGCCCAGTGATTTCTCCATGA |
| 156 | GCACCACATGTCAATCTCTACTGTGCTTATCTCATA |
| 157 | GCAGCACAAAAGTTACTCTCCTCTACCGTGCCCCTA |
| 158 | GCAGTTTGCGTGGATACTCTACTGTGCTGACCCTTA |
| 159 | GCATACATGAACTCTACCGTGCCCGTTGACTTGAAA |
| 160 | GCATAGCGGTTCACATTATTTTACTCTACCGTGCC |
| 161 | GCCACAGTATCGTTCTCGAGCTGGTTCCCGCCAT |
| 162 | GCGAACATCACTCTACCGTGCCATCTGAAATGACGTGA |
| 163 | GCGAACTTGTAACTCTACTGTGCTTATATTAAGGTTGA |
| 164 | GCGACCAATACTCTACTGTGCTGATACGGATTTTA |
| 165 | GCGACCACTCTATAACCTCAACCGTGCTCACTCCT |
| 166 | GCGCAAGTTGTCTCTACCGTGCCCCGAAAGTTTTGGA |
| 167 | GCGCACCACCTACATTGTCTCCACCGTGCTTTATT |
| 168 | GCGCACCCACGTGAACTCTACCGTGCCTATTTCCTA |
| 169 | GCGCACCGACCTCTACCGTGCCAAAATAGGTTATCTGA |
| 170 | GCGCCACCACACAAACCTTCCCTATCGAGGGAGAT |
| 171 | GCGCGGACTATATTACTCTACTGTGCCCTGCTTATGA |
| 172 | GCGGATAGGACAATAACTTACTCCACTGTGCCATC |
| 173 | GCGGTGACCTCTACTGTGCGCCCCAAGCCTTAGTT |
| 174 | GCGTACAGAACCTCTACCGTGCCCACTCACTTCCATGA |
| 175 | GCGTCCCCTCCCGGATGGTCCTTTCTCTACTGTGC |
| 176 | GCGTGCTAACGGTATGCAAGACGTATGCGATTTTC |
| 177 | GCTAGACCGATCCACCTCAAACCTCTACTGTGCCT |
| 178 | GCTAGCTTAGCTCTACCGTGCACATTCCGCTATTT |
| 179 | GGTGCAGGCAAGATATTTTACTCTACTGTGCATTT |
| 180 | GTAAATGTACATGCGTATCCTCACCTCTACTGTGC |
| 181 | TAACACGTCTTTCACTCTACTGTGCCCTTTATGCC |
| 182 | TAATGGCATGCGGACCTATCCTCTACCGTGCTCCTTGA |
| 183 | TATGCGATTTCTCTACCGTGCCAATATGCCTTGTT |
| 184 | TCTGCGATTCTACCGTTACTCTACCGTGCCACCAAA |
| 185 | TGCGCAGTCATTTCGCCATGTTCTCTACCGTGCCAA |
| 186 | TGTCAGGCGGTAGTACTCTCCACCGTGCCTATTGTTGA |

TABLE 28
Moderate Control Sequences

| SEQ ID | |
|---|---|
| NO. | Variable Region |
| 187 | ACATGCATACCCTACGAATCGTTCCATCACCATAC |
| 188 | AGTCAGTGCGCCCGCTATTTACGATCTCACTGTTC |
| 189 | AGTGCAGTCGCGATGGGAACTTCTTCTTTGCTTTA |
| 190 | ATGGCCATGCGAACCGAAACCTAGCCCATTTTCCTA |
| 191 | ATTGCGGTCATCCCCTTCCACGCTATACCACCAT |
| 192 | CACTGCAGGTCACTGGCGCCCTATTTCCTCACATT |
| 193 | CATGCCCGTAAACGCCTAATCTACCACCTTTTGCT |
| 194 | CATGCCGCCTTTCGACTTCCATATCCCAACACGCC |
| 195 | CATGCCGGTCATTCCATACTCAAACTCATTCACTC |
| 196 | CATGCGAGCTACCCTTATCATCTCATGTTTGCTTT |
| 197 | CATGCGATTGCGCCCCATTCCTTGCCTTATCTCAC |
| 198 | CATGCGCACATCGTACTCCGTAGCCCTAAATTATCA |
| 199 | CATGCGCCCTGTGCGTTCTCTACTACCCTAATCAT |
| 200 | CATGTACGCACACCCACTGATTCTTTACCACCCACTGA |
| 201 | GCAGGACACCCCCTCATTATTTGTTTCATCCTACG |
| 202 | GCATCAGGCGCACTTTCATTTGCTAATCGTTTTTT |
| 203 | GCCATGCGAGAGGGTTATTGTTGATCTCATGGGTT |
| 204 | GCGATAAAGCCCATGTAACCCTCTGAAAACCCGAT |
| 205 | GCGCCACGAGCTACCCGACTTCCGATTACTTTCTT |
| 206 | GCGGACATCGGGCACTTTATACAACCACCTTTTTG |
| 207 | GCTGCAGGCCGTCCCAAATATTCGCTCCCACACATA |
| 208 | GCTGGTCAGGCGTTCCACACTTCCTACCCGCTTTT |
| 209 | TATGCGCAGGACCACCTATTACACGACCTTATCCT |
| 210 | TCAACTGGGGTCAGTGCCAACGCTTACTTTCTTCT |
| 211 | TCAAGCAGTCATAGCCGGTTTCACGCTTTACTTAC |

TABLE 29
Negative Control Sequences

| SEQ ID | |
|---|---|
| NO. | Variable Region |
| 212 | AAAACACGCAAACTACCTGGAAACTTGACTTCTTT |
| 213 | AAAACACTCACGATACCTACCCTGGTCTTCACAAC |
| 214 | AAAACAGCAGGCATTTTCCTGTACTTTCGAATTCA |
| 215 | AAAACCACAGCTACCATTATCGCATTGGCCCTACT |
| 216 | AAAACCCAAGCACCGAACGAACTATCCCTTTTTCT |
| 217 | AAAACCCACCACGCGTCGTACGCATACCACCCTTT |
| 218 | AAAACCGGTCCTGCGCCTTCTTCTCCGCTTTTATT |
| 219 | CAGGTACTGTGGCAGGCGATCCATTGCTCTCTTTT |
| 220 | CAGGTCAGCAGTCCAGGCGATTACTTTCTCTTTTC |
| 221 | CAGTAACCGCTGTCTGTCATTTTTCAACATTCTGT |
| 222 | CAGTAACTGTAGTCGTCGAACCTTGCTTACAACCCA |
| 223 | CAGTAAGGAAGCTCATGCGGTACAGGTCTACCTCG |
| 224 | CAGTAAGTGCTGTCACTGCGCCACTTGTAAATACTTGA |
| 225 | CAGTAATGCGAAGCTAGTACGTTCTCTCTTATTTTA |
| 226 | CAGTACAAACATCGCGATTCTTTCCTTGATACTGT |
| 227 | GAGGGCGGCTCTAATGCATGCGCTTTCATCTTTGC |
| 228 | GAGGGCGGGCAGTCATTTCGATTATATCTGCCTACA |
| 229 | GAGGGCGGTCCAACGCGCAATGTCTTTTTTCTTCCGA |
| 230 | GAGGGCGTACAGGAGTCTTGCGGTCCACATTTTAT |
| 231 | GAGGGCTACTGAAGTTAATGGCATTCTTCTCTATC |
| 232 | GAGGGCTCATGCCAGCCGCTTTTCTTACCTTTATC |
| 233 | GAGGGCTGAACAAGTAGTGCGTACATTTTCCTTCCTGA |
| 234 | GAGGGCTGCAGGCATCCAATTTCCTCCTTGTCCCT |
| 235 | GAGGGGCCGTCCTTCGTACGGAATGTGCATGCGCT |
| 236 | GAGGGGCGGTCATTGCCGTTAGCCTCCTTTCGCCT |

[1248] The data described above (i.e., FIGS. 15A-F and Tables 27-29) were obtained with 1 ng input of the specified oligonucleotide libraries used to probe the various samples. In addition, probing experiments were performed with lower titers of the C-R7N oligonucleotide library, specifically 0.1, 0.01, 0.001 and 0.0001 ng. A total of 826 unique oligonucleotide sequences were detected between all titers. An eighth enrichment round (round 8) was performed with four titers of the library C-R7N-1 (i.e.. 1 ng input in round 7): 1, 0.1, 0.01 and 0.001 ng input. From each titer, sets of oligonucleotides that passed the same filters described above were obtained. The composite set of oligonucleotides was compared to the sets of oligonucleotides obtained from the titrations of the C-R7N library noted above. The variable regions of 733 oligonucleotides observed in at least two of the five sets of oligonucleotides are listed in rank order by occurrence in SEQ ID NOs. 237-969. These oligonucleotides were identified as oligonucleotide probes that selectively bind to cancer samples. As in Table 27, the oligonucleotides were synthesized with a 5′ region consisting of the sequence (5′-CTAGCATGACTGCAGTACGT (SEQ ID NO. 131)) and a 3′ region consisting of the sequence (5′-CTGTCTCTTATACACATCTGACGCTGCCGACGA (SEQ ID NO. 132)) flanking the variable regions. The 733 cancer specific sequences which can be used to identify cancer samples along with those in Table 27 above.

[1249] As noted, next generation sequencing technologies can be used to identify and quantify members of the oligonucleotide library that bind to a sample. We also designed probes that can be used to identify and quantify members of the oligonucleotide library that bind to a sample without requiring a PCR step. This procedure relies on hybridization of the bound oligonucleotide with oligonucleotide-specific complementary probe. The complementary probe can directly or indirectly carry a tag that can be detected. For example, the oligonucleotide-specific complementary probe may carry a fluorescent tag. A general design is shown in FIG. 14G. In the figure, an individual member of the oligonucleotide library 1401 is bound by complementary probe 1402. Complementary probe 1402 consists of three sections from 5′ to 3′: 1) probe part B 1403; 2) probe complement 1404; and 3) probe part A 1405. The member of the oligonucleotide library 1401 is bound by complementary probe 1402 via base pair hybridization between the variable region of oligonucleotide library 1401 and the probe complement region 1404 of complementary probe 1402. Tag probe 1406 which is fluorescently labeled (indicated by the circles in the figure) and capture probe 1407 hydridize to the probe part A 1405 and probe part B 1403 of complementary probe 1402, respectively. These features allow for the capture of the entire complex (i.e., oligonucleotide library 1401, complementary probe 1402, tag probe 1406, and capture probe 1407) via the capture probe, combined with detection via the label of the tag probe 1406.

[1250] For these experiments, the complementary probes were designed to work with tag probe and capture probe supplied as part of the nCounter nucleic acid detection system from NanoString Technologies, Inc. (Seattle, Wash.). The complementary probes for nCounter quantification were designed as reverse complement to the top 50 oligonucletide probe binders and 50 negative controls, described above. The complete sequences are shown in Table 30. In the table, the ID column is an identifier and the Type column indicates if the sequence is to a control oligonucleotide probe (“neutral”) or to a cancer binding oligonucleotide probe (“binder”). Each complete sequence comprises from 5′ to 3′: 1) 5′ Region (Probe Part B 1403); 2) Probe Complement Region 1404; and 3) 3′ Region (Probe Part A 1405), where region identification numbers correspond to FIG. 14G. The probe complement region may be shorter than the variable sequence of the corresponding oligonucleotide probe in order to optimize binding parameters (e.g., specificity and melting point). The probe complement region may also be so optimized to bind against the variable sequence of the corresponding oligonucleotide probe and also to at least a portion of its 5′ and 3′ flanking sequences (e.g., as shown in Tables 27-29 above). The oligonucleotides each have a 5′ region 1403 consisting of the sequence (5′-CGAAAGCCATGACCTCCGATCACTC (SEQ ID NO. 970)) 5′ of the Probe Complement Region 1404 and a 3′ region 1405 as shown in Table 30 located 3′ of the Probe Complement Region 1404. Probe Part A1405 shown in FIG. 14G corresponds to SEQ ID NO. 971.

TABLE 30
Complementary Probe Sequences

| | | Probe Complement | 3′ Region (Probe |
|---|---|---|---|
| SEQ ID NO | Type | Region 1504 | Part A 1505) |
| 972 | neutral | CAAGTTTCCAGGTAGTTTGC | CCTCAAGACCTAAGCGACA |
| | | GTGTTTTACGTAC | GCGTGACCTTGTTTCA |
| 973 | neutral | CAGGGTAGGTATCGTGAGTG | CATCCTCTTCTTTTCTTGG |
| | | TTTTACGTACT | TGTTGAGAAGATGCTC |
| 974 | neutral | GAAAGTACAGGAAAATGCCT | CACAATTCTGCGGGTTAGC |
| | | GCTGTTTTACGTAC | AGGAAGGTTAGGGAAC |
| 975 | neutral | GAGACAGAGTAGGGCCAATG | CTGTTGAGATTATTGAGCT |
| | | CGATAATG | TCATCATGACCAGAAG |
| 976 | neutral | GAGACAGAGAAAAAGGGATA | CAAAGACGCCTATCTTCCA |
| | | GTTCGTTCGGT | GTTTGATCGGGAAACT |
| 977 | neutral | GACGCGTGGTGGGTTTTACG | CGAACCTAACTCCTCGCTA |
| | | TAC | CATTCCTATTGTTTTC |
| 978 | neutral | GCGCAGGACCGGTTTTACGT | CCAATTTGGTTTTACTCCC |
| | | AC | CTCGATTATGCGGAGT |
| 979 | binder | GAGACAGAAAGTCGCATGGG | CTTTCGGGTTATATCTATC |
| | | CAGTA | ATTTACTTGACACCCT |
| 980 | binder | AGTGGAGTTTAATTGGCCTT | CAACAGCCACTTTTTTTCC |
| | | CAGTTACGTACT | AAATTTTGCAAGAGCC |
| 981 | neutral | GAACGATTCGTAGGGTATGC | CACCGTGTGGACGGCAACT |
| | | ATGTACGTACT | CAGAGATAACGCATAT |
| 982 | binder | AGTATCAACGCCGGCATGTA | CCTGGAGTTTATGTATTGC |
| | | CGTAC | CAACGAGTTTGTCTTT |
| 983 | binder | TAAAGGGCGTGGCATGTCTA | CAGATAAGGTTGTTATTGT |
| | | CGTAC | GGAGGATGTTACTACA |
| 984 | binder | GAGACAGAACATTGGCACAG | CTTCCTTCCTGTGTTCCAG |
| | | TAGAGATAGGT | CTACAAACTTAGAAAC |
| 985 | binder | TAATGGCAGCCTTACGTACC | CATAAAATTGGTTTTGCCT |
| | | TACGTACT | TTCAGCAATTCAACTT |
| 986 | neutral | CGGGCGCACTGACTACGTAC | CTGGTCAAGACTTGCATGA |
| | | | GGACCCGCAAATTCCT |
| 987 | binder | GAGACAGGAAGGGCACCGTA | CTTTCGTTGGGACGCTTGA |
| | | GA | AGCGCAAGTAGAAAAC |
| 988 | neutral | CCATCGCGACTGCACTACGT | CCAGCAGACCTGCAATATC |
| | | ACT | AAAGTTATAAGCGCGT |
| 989 | binder | GAGACAGTCAAGGCACAGTG | CCTGCCAATGCACTCGATC |
| | | GAGTAATG | TTGTCATTTTTTTGCG |
| 990 | binder | GGTAGAGAATACAAGGGTCT | CAAACTGGAGAGAGAAGTG |
| | | GCAACTACGTAC | AAGACGATTTAACCCA |
| 991 | neutral | CGGTTCGCATGGCCATACGT | CGATTGCTGCATTCCGCTC |
| | | AC | AACGCTTGAGGAAGTA |
| 992 | neutral | GAAGGGGATGACCGCAATAC | CTGAGGCTGTTAAAGCTGT |
| | | GTACT | AGCAACTCTTCCACGA |
| 993 | neutral | CCAGTGACCTGCAGTGACGT | CTAGGACGCAAATCACTTG |
| | | ACT | AAGAAGTGAAAGCGAG |
| 994 | binder | TGGAGTTCAACAATATCAGT | CCACGCGATGACGTTCGTC |
| | | TAGCAGTGACGTAC | AAGAGTCGCATAATCT |
| 995 | neutral | CCTGCCACAGTACCTGACGT | CATTTGGAATGATGTGTAC |
| | | ACT | TGGGAATAAGACGACG |
| 996 | neutral | CTGGACTGCTGACCTGACGT | CACAAGAATCCCTGCTAGC |
| | | ACT | TGAAGGAGGGTCAAAC |
| 997 | neutral | GAAAAATGACAGACAGCGGT | CTTGACGTAGATTGCTATC |
| | | TACTGACGTAC | AGGTTACGATGACTGC |
| 998 | neutral | AGGTTCGACGACTACAGTTA | CTTACAGATCGTGTGCTCA |
| | | CTGACGTAC | TGACTTCCACAGACGT |
| 999 | neutral | CGCATGAGCTTCCTTACTGA | CTTGGAGGAGTTGATAGTG |
| | | CGTACT | GTAAAACAACATTAGC |
| 1000 | neutral | GAGACAGTCAAGTATTTACA | CCTACGTATATATCCAAGT |
| | | AGTGGCGCAG | GGTTATGTCCGACGGC |
| 1001 | neutral | GAGACAGTAAAATAAGAGAG | CAGCAAGAAGGAGTATGGA |
| | | AACGTACTAGCTTCGCATTA | ACTTATAGCAAGAGAG |
| 1002 | neutral | GGAAAGAATCGCGATGTTTG | CACCCCTCCAAACGCATTC |
| | | TACTGACGTAC | TTATTGGCAAATGGAA |
| 1003 | neutral | GGCGTTTACGGGCATGACGT | CCCGAAGCAATACTGTCGT |
| | | AC | CACTCTGTATGTCCGT |
| 1004 | neutral | GTCGAAAGGCGGCATGACGT | CCGGGAATCGGCATTTCGC |
| | | AC | ATTCTTAGGATCTAAA |
| 1005 | neutral | GAGACAGGAGTGAATGAGTT | CCGATCTTCATAACGGACA |
| | | TGAGTATGGAATGAC | AACTGAACGGGCCATT |
| 1006 | binder | GTTAATGGAAGCTTGTCGCA | CGCTATGCAGACGAGCTGG |
| | | TGACGTACT | CAGAGGAGAGAAATCA |
| 1007 | neutral | ATGATAAGGGTAGCTCGCAT | CATTCGCAACCATGTGAAG |
| | | GACGTACT | TAATGTGAGCGTACTT |
| 1008 | neutral | GGCGCAATCGCATGACGTAC | CACCAGTTAGCGTGGCGTA |
| | | T | TACCATGTTGTTAACA |
| 1009 | neutral | GAGACAGTGATAATTTAGGG | CCTGAATCAATAGAACAAT |
| | | CTACGGAGTACG | ATCAGTTATGGCGGTG |
| 1010 | neutral | GAGACAGATGATTAGGGTAG | CGGTTGTTAATATGACAGG |
| | | TAGAGAACGCAC | CCGCTAAAGACGTTCT |
| 1011 | binder | GAGACAGTTTGAATCATGAG | CCGTCTCAGATGAGTGGGT |
| | | TTTGTGAAAGCGT | TAATCAATCAAGTATG |
| 1012 | binder | GAGAGAATAGGACGTACGCA | CTGACACATTAGTAACGTC |
| | | TGACGTACT | GGCAAGCACTTAGTCG |
| 1013 | neutral | TGGGTGTGCGTACATGACGT | CGTGAACCAGATTATGTAT |
| | | ACT | GGACGCGCAATAGATA |
| 1014 | binder | GGTTTCCGCATTGCAGGACG | CATACGAAATTTGAGCAAG |
| | | TAC | CAATTGAAGGCTTAGA |
| 1015 | binder | CCCTGGCTCGCGACGTAC | CTATCAGCTAATAGGGTCG |
| | | | GCTCAACAGTGTATCC |
| 1016 | binder | CAGTAGAGAACAAGTCGCAC | CTATCAATTCGTGACCCCG |
| | | GACGTAC | ATCATCCAGTCCAGAA |
| 1017 | neutral | GAGACAGGCAAAGATGAAAG | CTTGAGCTCTAGGCCCAAA |
| | | CGCATG | ACGACCTTAATGGTCA |
| 1018 | neutral | TGCCCGCCCTCACGTAC | CTAGCCCAGATCCTACGAG |
| | | | ATGAGCTACGTAACTA |
| 1019 | neutral | GTTGGACCGCCCTCACGTAC | CAAATGCACTCTATATGGA |
| | | | GGGAGAGTAGCTGGAT |
| 1020 | neutral | ACTCCTGTACGCCCTCACGT | CCTGGTCTAGGTATCTAAT |
| | | AC | TCGTGGGTCGGGTACT |
| 1021 | neutral | GCCATTAACTTCAGTAGCCC | CATTAGCTCGGATGCTATC |
| | | TCACGTAC | AGCTTGCGCCTATTAT |
| 1022 | neutral | GAGACAGGATAAAGGTAAGA | CACGATCTGTATTTTGCAC |
| | | AAAGCGGCTG | CTTTCGCTATGCTGAG |
| 1023 | neutral | GAGACAGTCAGGAAGGAAAA | CTGTGTCCGTCTATACGCA |
| | | TGTACGCAC | TACTGGTCCACATATA |
| 1024 | neutral | GAGACAGAGGGACAAGGAGG | CATGTTGGAGTTAACGGAG |
| | | AAATTGG | ACCCGCCATCGTTTAC |
| 1025 | neutral | GGACGGCCCCTCACGTAC | CGCTCATTTTGAACATACG |
| | | | ATTGCGATTACGGAAA |
| 1026 | neutral | ATGACCGCCCCTCACGTACT | CCTATGCATCATGTGCCTC |
| | | | ACTAGGACATCATGCT |
| 1027 | binder | CACAGTAGAGGAATATGCGC | CCTAAATTGGGAAAAAAGG |
| | | TATCACGTACT | TTTTAGCTATTGATGG |
| 1028 | binder | GAGACAGTCATTGGGCACGG | CTTCAGTTAAAGGCTATCT |
| | | TAGA | TGCTCCGCTCGTTCTC |
| 1029 | binder | GCACGGTAGAGAGTAGTTGC | CTTAAAGCTATCCACGAAT |
| | | ACGTAC | GTCAAAAATGTGGTTT |
| 1030 | binder | GAGACAGTATGAGATAAGCA | CCCGAATGTATAATGCTGA |
| | | CAGTAGAGATTGACATGT | CGTTCTTGCTTTTGGC |
| 1031 | binder | GAGACAGTAGGGGCACGGTA | CCTATTGAAGCAATCCTCT |
| | | GAG | CCCCAATACTTAAAAA |
| 1032 | neutral | GGGGGTGTCCTGCACGTAC | CTACGGTTACCGTCTTTAT |
| | | | AAGTGAACAAAACCGG |
| 1033 | binder | GTAGAGTATCCACGCAAACT | CTCTGTGAACTGTCATCGG |
| | | GCACGTAC | TCCGATCAATTAGTCT |
| 1034 | binder | GCACGGTAGAGTTCATGTAT | CTCCCCTTTCCCAAGTAAA |
| | | GCACGTAC | TGTACGGGAATTATCG |
| 1035 | binder | GAGACAGGGCACGGTAGAGT | CGCTTTATTATGTGTTCGT |
| | | AAAATAATGTGA | CTAACTCTGTTTCTGT |
| 1036 | neutral | AAAGTGCGCCTGATGCACGT | CCGAGTGCATGAGCTGTCT |
| | | AC | TTCACATGATACATCG |
| 1037 | binder | CTCGAGAACGATACTGTGGC | CTATTTCTGTTCACGGATG |
| | | ACGTAC | AAGGCCTATATCAATG |
| 1038 | neutral | CCCTCTCGCATGGCACGTAC | CCATCCACTTTCATGGAAA |
| | | | CAATAAGAGCAGGGAA |
| 1039 | binder | GAGACAGTCACGTCATTTCA | CACAAACTCACTACTACCA |
| | | GATGGCA | ACAACCTCACCAAAAA |
| 1040 | binder | GAGACAGTCAACCTTAATAT | CTCATGTCCTCTGTTAATC |
| | | AAGCACAGTAGAGTTACAAG | CAGCCTGAATATGCCA |
| | | TTC | |
| 1041 | binder | GCACAGTAGAGTATTGGTCG | CAGAAATGTCACTCCCATG |
| | | CACGTAC | GTGGCTGATATAGAAA |
| 1042 | binder | GAGACAGAGGAGTGAGCACG | CATGTCGAACCTTGGATAG |
| | | GTT | GAGCGACCGATTACGT |
| 1043 | neutral | GGTTACATGGGCTTTATCGC | CTCAGGTTGTTACTTGAAG |
| | | ACGTACT | GGTTCAACACGAGCTC |
| 1044 | binder | GGTAGAGACAACTTGCGCAC | CAGAAGATCAAAAAACGAT |
| | | GTACT | CCCTGTCCATCAATAC |
| 1045 | binder | GAGACAGAATAAAGCACGGT | CTTAGGCTACCAAATGAAT |
| | | GGAGACAATG | TTAAAGCCAGCTGAAA |
| 1046 | binder | GAGACAGTAGGAAATAGGCA | CCAATGCTTGCAGTATGTA |
| | | CGGTAGAGTT | TCCTGATCGTGCGTGC |
| 1047 | binder | AGGTCGGTGCGCACGTAC | CCTGCATTCTCATGGAAAT |
| | | | GCAATGGATTCATTCC |
| 1048 | binder | GTGTGGTGGCGCACGTACT | CCTGTTGCAGTATCACGTA |
| | | | AATACCTACTTCGATA |
| 1049 | neutral | GAGACAGAAGAAAGTAATCG | CTAGCTGTTATGGCTATTG |
| | | GAAGTCGGGTAG | CTGAAACAGCAAAATT |
| 1050 | binder | ACAGTAGAGTAATATAGTCC | CCTTACGACTTCACTGCAA |
| | | GCGCACGTAC | TTGACGATTCAGTTAA |
| 1051 | neutral | GAGACAGCAAAAAGGTGGTT | CCTCATACCAATGTAAAGT |
| | | GTATAAAGTGCC | ATAGTTAACGCCCTGT |
| 1052 | binder | GAGACAGGATGGCACAGTGG | CATCTCCATGACTGCTTGA |
| | | AGTAAG | GCGGCTGGAGAATCTG |
| 1053 | binder | ACAGTAGAGGTCACCGCACG | CTTTCGCCACCCATATAAA |
| | | TAC | CCCCACTTCGTCCTCA |
| 1054 | binder | CGGTAGAGGTTCTGTACGCA | CAAGGCAGAGCAAATGTGA |
| | | CGTAC | CACTGTCTATCAGTAC |
| 1055 | binder | GGGAGGGGACGCACGTAC | CCTACATATATAGGAAAAG |
| | | | GGAAGGTAGAAGAGCT |
| 1056 | binder | GAGACAGGAAAATCGCATAC | CCTTCTGGAATTTCTTCCT |
| | | GTCTTGCATAC | TTGATTTTGCCATTTT |
| 1057 | binder | GAGGTGGATCGGTCTAGCAC | CTCCTAAGGTTGCTGATTT |
| | | GTAC | GGTTGTTGGAGACCCA |
| 1058 | binder | ACGGTAGAGCTAAGCTAGCA | CAAGGCCTAGCCTAAAGGT |
| | | CGTACT | TCTTGCAGAGCAACAT |
| 1059 | neutral | CGGCCTGCAGCACGTACT | CCTAATTAGCTCTAGGAAA |
| | | | CACAACCCCGGGATTT |
| 1060 | neutral | GAACGCCTGACCAGCACGTA | CTTGAGTTATACGGAACTT |
| | | C | CGCAAAAGTATTCCCT |
| 1061 | binder | GAGACAGAAATGCACAGTAG | CCATCCATCAACAACTGCT |
| | | AGTAAAATATCTTGCCTG | CCAACAGCCTTTCCAT |
| 1062 | binder | GAGACAGGCACAGTAGAGGT | CCGGCACAAGCAGACAAAA |
| | | GAGGATA | TCAACATGGTCATTTA |
| 1063 | binder | GAGACAGGGCATAAAGGGCA | CGCTCACGTGATCTACCCT |
| | | CAGTA | AGCTGACCGCTAATGA |
| 1064 | binder | GAGACAGTCAAGGAGCACGG | CTCTAACCTGCATACATAT |
| | | TAGAG | GGCATTTAGTTGTTCA |
| 1065 | binder | GGCACGGTAGAGAAATCGCA | CCTTCTTGAAGACCTATGT |
| | | TAACGTAC | AAAGAAACGGGTCACT |
| 1066 | neutral | GAGACAGAGGATAAGGTCGT | CCATACGCATGACTACATT |
| | | GTAATAGGTGG | ACAACGGGCCAGGAAG |
| 1067 | neutral | GAGACAGAGAAGAAAGTAAG | CAGGTCTCGATCTCGTACA |
| | | CGTTGGCAC | AAACGACTATGACCAT |
| 1068 | neutral | CCGGCTATGACTGCTTGAAC | CATGAACGTGTCGTGTTAT |
| | | GTACT | GCAGCGGTATGTCGTG |
| 1069 | binder | GAGACAGTTTGGTGGCACGG | CGTCGTGTCTTAGACGACT |
| | | TAGA | GTGTGTGATTCTCGAG |
| 1070 | binder | GCGAAATGACTGCGCAACGT | CCACCGTTTTGCCAGTTCC |
| | | ACT | ACCAGTAACTGTAAGG |
| 1071 | binder | AGAGTACTACCGCCTGACAA | CGCCCTGGAACAACGGTTA |
| | | CGTACT | TATTCTCTGGCAGAAC |

### Example 27: Oligonucleotide Probes: Aggressive Breast Cancer, Non-Aggressive Breast Cancer, and Non-Cancer

[1251] This Example presents oligonucleotide probes identified in an oligonucleotide probe library enriched against plasma-derived microvesicles from patients with aggressive breast cancer, non-aggressive breast cancer, and non-cancer (breast biopsy-negative samples). The general methodology follows that in Example 26 above. Oligonucleotides were screened using plasma samples from 60 individuals with breast cancer and 60 individuals without breast cancer.

[1252] A combination of ultracentrifugation and PEG based partitioning of microvesicles from each input plasma sample. The F-TRin-35n-B 8-3s library as described herein was enriched against microvesicles from pooled plasma samples (cancer or non-cancer pools) which were isolated using ultracentrifugation. Subsequent enrichments were performed by isolating the microvesicles using PEG precipitation. As in Example 26, the input oligonucleotide library was exposed to positive, negative and again positive targets sequentially and then PCR amplified. We performed two parallel tracks of initial enrichment against pooled samples, one track where pooled cancer samples were considered positive and non-cancer samples were negative, and another track where pooled non-cancer samples were considered positive and cancer samples were negative. The enriched libraries resulting from each track were pooled together before probing individual patient samples in the following experiments.

[1253] Oligonucleotides that Distinguish Aggressive and Non-Aggressive Breast Cancer

[1254] We first identified oligonucleotides that distinguished between aggressive and non-aggressive breast cancer. For these experiments, the aggressive breast cancer patient samples were considered as positive samples (31 samples) and non-aggressive breast cancer patient samples were considered as negative samples (29 samples). The enriched libraries from above were subjected to the oligonucleotide probing assay on the individual cancer plasma samples. A two-step normalization procedure was performed to normalize the sum of the copy numbers for all oligonucleotides associated with the PEG-precipitated pellet. The copy number of each recovered oligonucleotide was divided by the total number of sequence reads for each sample, then multiplied by the mean of totals of all samples. This data treatment accounts for the different number of sequence reads for each patient even though the same amount of DNA library was added for each patient-sample. The final value for each oligonucleotide for each patient is the average of normalized copy numbers from three probing replicates. We excluded oligonucleotides with an average read-count across all patients ≤100, and subsequently selected among the remaining oligonucleotides only those that show a >20% CV across the 60 patient samples. This process resulted in approximately 12000 remaining oligonucleotides.

[1255] We compared patient profiles using clustering analysis with one minus Pearson correlation coefficients (1−Pₑ) as the distance measure. The resulting heat-map based on the number of oligonucleotide sequence counts allows for visualisation of similarities in oligonucleotide copy numbers among all patient samples. See FIG. 15. In the figure, the X-axis shows individual oligonucleotides and the Y-axis shows samples (aggressive or other (i.e., non-aggressive)). Oligonucleotides from the indicated Cluster 1 have relatively low counts for the majority of aggressive cancers. Oligonucleotides from the indicated Clusters 2 and 3 have relatively higher counts in a majority of aggressive cancer samples. It is noted that oligonucleotide probes that are observed at either higher or lower relative copy number in the advanced cancer samples versus non aggressive can be used as markers to distinguish these sample groupings. Oligonucleotides from the indicated Cluster 4 were more selective toward particular aggressive cancer samples, and were able to identify additional 12 advanced cancer samples that were missed by oligonucleotides in Clusters 1-3. Cluster 4 oligonucleotides may be useful for detecting particular subsets of aggressive cancers.

[1256] The distances between samples within each cluster are considerably smaller than the distance between the two clusters. As can be seen in FIG. 15, these two groups of samples have very different proportions of advanced cancer cases versus other; in cluster I, 15 of the 19 patients are advanced cancer cases (79%), while in cluster II, only 16 of 40 patients are advanced cases (40%). Fisher exact p-value equals 0.01 with an odds ratio of 4.9, indicating that the ratio of advanced to other cancer in these two clusters is statistically significant.

[1257] The SEQ ID NOs. of the variable regions from the oligonucleotides in Clusters 1-4 in FIG. 15 are shown in Table 31. As in Table 27, the oligonucleotides were each synthesized with a 5′ region consisting of the sequence (5′-CTAGCATGACTGCAGTACGT (SEQ ID NO. 131)) and a 3′ region consisting of the sequence (5′-CTGTCTCTTATACACATCTGACGCTGCCGACGA (SEQ ID NO. 132)) flanking the variable region. The sequences can be used in the identification of aggressive breast cancer samples.

TABLE 31
Clusters 1-4 Variable Regions SEQ ID NOs

| Cluster | SEQ ID NO |
|---|---|
| Cluster 4 | 1072-1121 |
| Cluster 3 | 1122-1171 |
| Cluster 2 | 1172-1221 |
| Cluster 1 | 1222-1421 |

[1258] A selection of 50 negative control oligonucleotides was made from the same experiments as above. As criteria, we chose those oligonucleotides with the lowest variability (% cv) between biological samples when taking all 120 samples from the noted probing into account. The variable regions of the 50 negative controls are listed in SEQ ID NOs 1422-1471. As in Table 27, the oligonucleotides were synthesized with a 5′ region consisting of the sequence (5′-CTAGCATGACTGCAGTACGT (SEQ ID NO. 131)) and a 3′ region consisting of the sequence (5′-CTGTCTCTTATACACATCTGACGCTGCCGACGA (SEQ ID NO. 132)) flanking the variable regions. These sequences can be used as negative controls when identifying aggressive breast cancer samples.

[1259] Oligonucleotides Specific to Non-Cancer Samples Versus Cancer Samples

[1260] We also identified a set of oligonucleotides that were specific to the non-cancer plasma samples. In addition to probing the cancer samples noted above, the enriched oligonucleotide probe library was used to perform the probing test on the 60 individual non-cancer plasma samples. Each sample was probed as described above. The oligonucleotides recovered with each individual non-cancer and cancer plasma sample were identified using next-generation sequencing. The averaged frequencies of individual oligonucleotide sequence reads between non-cancer and cancer samples were used to calculate a fold-change of non-cancer versus cancer. Oligonucleotides with both read counts above 100 and fold change (non-cancer/cancer) greater or equal to 2 were identified as non-cancer specific oligonucleotide probes (SEQ ID NOs. 1472-1486). In addition, a selection of negative control oligonucleotides were selected as those with fold change less than or equal to 1 and read count below 20 (SEQ ID NOs 1487-1501).

[1261] The variable regions of the non-cancer specific oligonucleotides and negative control oligonucleotides are listed by rank order in SEQ ID NOs. 1472-1486 and SEQ ID NOs 1487-1501, respectively. As in Table 27, the oligonucleotides were synthesized with a 5′ region consisting of the sequence (5′-CTAGCATGACTGCAGTACGT (SEQ ID NO. 131)) and a 3′ region consisting of the sequence (5′-CTGTCTCTTATACACATCTGACGCTGCCGACGA (SEQ ID NO. 132)) flanking the variable regions. The sequences can be used to identify non-cancer samples (SEQ ID NOs. 1472-1486) or used as negative controls for such experiments (SEQ ID NOs 1487-1501).

[1262] Oligonucleotides Specific to Cancer Samples Versus Non-Cancer

[1263] We then identified a set of oligonucleotides that were specific to the cancer plasma samples as compared to the non-cancer samples. Pooled cancer and non-cancer samples were probed as described above. The oligonucleotides recovered with each individual cancer and non-cancer plasma sample were identified using next-generation sequencing. The averaged frequencies of individual oligonucleotide sequence reads between cancer and non-cancer samples were used to calculate a fold-change of cancer versus non-cancer. Oligonucleotides with both read counts above 10 and fold change (non-cancer/cancer) greater or equal to 1.5 were identified as cancer specific oligonucleotide probes (SEQ ID NOs. 1502-1539). In addition, a selection of negative control oligonucleotides were selected as those with fold change less than or equal to 1 and read count below 20. See SEQ ID NOs 1487-1501 as described above.

[1264] The variable regions of the cancer specific oligonucleotides are listed by rank order in SEQ ID NOs. 1502-1539. As in Table 27, the full length oligonucleotides were synthesized with a 5′ region consisting of the sequence (5′-CTAGCATGACTGCAGTACGT (SEQ ID NO. 131)) and a 3′ region consisting of the sequence (5′-CTGTCTCTTATACACATCTGACGCTGCCGACGA (SEQ ID NO. 132)) flanking the variable regions. These sequences which can be used to identify cancer samples.

### Example 28: Oligonucleotide Probes: Aggressive Breast Cancer, Non-Aggressive Cancer and Non-Cancer/Healthy Blood Plasma Targets with UC and PEG

[1265] This Example builds on the work presented in Example 27. Based on the results of the probing Aggressive cancer pool (50% patients with aggressive breast cancer), Non-Aggressive cancer pool and Healthy Pool (50% biopsy confirmed non-cancer and 50% healthy non-cancer), we obtained aptamers specific for:

[1266] Aggressive cancer compared to non-aggressive cancer and to non-cancer/healthy samples.

[1267] Non-aggressive cancer compared to aggressive and to non-cancer/healthy samples.

[1268] Non-Cancer/Healthy samples compared to aggressive and non-aggressive samples.

[1269] A combination of ultracentrifugation and PEG based partitioning of microvesicles from each input plasma sample. This approach potentially provides a cleaner patient sample and thus provide higher specificity for the intended target. As in Example 27, the input oligonucleotide library was exposed to positive, negative and again positive targets sequentially and then PCR amplified. Enriched libraries were subjected to the oligonucleotide probing assay on the plasma samples using sample pools as follows: ACP—aggressive cancer pool; NACP—non-aggressive cancer pool; HP—healthy pool (mix of non-cancer and normal samples). Each sample pool was probed two naïve (i.e., untrained) oligonucleotide probe libraries (6-3S and 8-3S described herein) with three replicates. Samples were sequenced in multiplex with 9 samples per flow cell. Indexing PCR was performed either with or without internal standard. The average number of sequence read counts between three replicates was considered for fold change and TTEST calculations. Sequences were identified that met the following criteria: fold change between pools >=2; p-value=<0.05, % cv=<20%, counts >=100.

[1270] The joint selection of oligonucleotides that passed the above criteria is shown in Tables 32 and 33. As in Table 27, the oligonucleotides each have a 5′ region consisting of the sequence (5′-CTAGCATGACTGCAGTACGT (SEQ ID NO. 131)) and a 3′ region consisting of the sequence (5′-CTGTCTCTTATACACATCTGACGCTGCCGACGA (SEQ ID NO. 132)). Tables 32 and 33 list in rank order the SEQ ID NOs of the variable region that are positioned between the 5′ and 3′ regions. The differences are that the starting libraries were derived from a first round of enrichment against a cancer pool (Table 32) or a first round of enrichment against a non-cancer pool (Table 33). However, after the first round the aliquots were pooled for subsequent enrichment. The combined oligonucleotide probe library can be used to distinguish between aggressive breast cancer, non-aggressive breast cancer, and non-cancer plasma samples in a single assay according to the column “Comparison.” In the Comparison column, sequences elevated in group 1 as compared to group 2 are shown as group 1/group 2. The legend for this column is “ACP”: Aggressive cancer pool; “HP”: healthy & non-cancer pool; “NACP”: Non-aggressive cancer pool. “IntSt” in the comparison row indicates that an internal standard was used during the enrichment. By way of illustration, the first two sets of comparisons in Table 32 are labeled ACP/HP, which indicates that these oligonucleotides were observed at high copy numbers after probing the aggressive breast cancer sample pool versus the healthy/non-cancer sample pool. Continuing with this illustration, higher numbers of such oligonucleotide probes binding to a sample can indicate the presence of an aggressive breast cancer.

TABLE 32
Oligonucleotide Probe Comparison and Variable Regions

| Comparison | SEQ ID NO. |
|---|---|
| ACP/HP (IntSt) | 1540-1551 |
| ACP/HP | 1552-1585 |
| HP/ACP (IntSt) | 1586-1611 |
| HP/ACP | 1612-1650 |
| NACP/HP (IntSt) | 1651-1655 |
| NACP/HP | 1656-1733 |
| HP/NACP (IntSt) | 1734-1754 |
| HP/NACP | 1755-1789 |
| NACP/ACP (IntSt) | 1790-1793 |
| ACP/NACP (IntSt) | 1794-1805 |
| ACP/NACP | 1806-1815 |

TABLE 33
Oligonucleotide Probe Comparison and Variable Regions

| Comparison | SEQ ID NO. |
|---|---|
| ACP/HP (IntSt) | 1816-1822 |
| ACP/HP | 1823-2004 |
| HP/ACP (IntSt) | 2005-2054 |
| HP/ACP | 2055-2234 |
| NACP/HP (IntSt) | 2235-2242 |
| NACP/HP | 2243-2318 |
| HP/NACP (IntSt) | 2319-2356 |
| HP/NACP | 2357-2491 |
| NACP/ACP (IntSt) | 2492-2507 |
| NACP/ACP | 2508-2583 |
| ACP/NACP (IntSt) | 2584-2593 |
| ACP/NACP | 2594-2728 |

### Example 29: Oligonucleotide Probes: Non-Aggressive Cancer Probes Identified in Libraries Enriched with Multiple Protocols

[1271] This Example builds on the work presented in Example 28. Here, we identified a set of oligonucleotide probes specific for non-aggressive cancer samples. The oligonucleotide probes were identified based on probing using an aggressive cancer pool (ACP), non-aggressive cancer pool (NACP) and healthy pool (HP) of plasma samples with naïve oligonucleotide libraries. Compared to the work in Example 28, four different enrichment schemes were used, as further detailed below. For purposes of these experiments, non-aggressive (or non-advanced) cancer is defined as sample with tumor size not exceeding stage T1, presence of nodes NO, Metastasis MO and positive estrogen/progesterone receptors.

[1272] In each case, the enriched libraries were subjected to the probing test on pooled plasma samples. The library enrichment was performed as described herein, see e.g., Example 21. The libraries were exposed to positive and negative targets and PCR amplified either after each binding or after series positive-negative-positive binding as described below. The positive and negative pools are indicated below for the different enrichment schemes. After each round of enrichment, next generation sequencing was used to determine a copy number of the recovered oligonucleotide probes. Averaged frequencies of individual oligonucleotide between the indicate pools were used to calculate the fold change. Oligonucleotide with counts above 50, fold change >=2 and % cv between replicates below 20% were considered as candidates and shown in the tables below.

[1273] Scheme 1

[1274] The positive target was the NACP plasma and the negative target was the HP plasma. The enrichment started with the naïve (non-enriched; NE) library. Microvesicles in the samples were isolated using ultracentrifugation in all stages. Each round of enrichment consisted of a complete set of positive-negative-positive binding events followed by PCR amplification of the enriched library. Two such rounds of binding were performed. The resulting library after the second enrichment (R2) is used for subsequent probing of the pooled samples (aggressive cancer, non-aggressive cancer and healthy). As in Example 28 above, comparisons performed included ACP/HP, HP/ACP, ACP/NACP, NACP/ACP, HP/NACP, NACP/HP.

[1275] Resulting oligonucleotides identified in these selections are shown in Table 34. As in Table 27, the oligonucleotides each have a 5′ region consisting of the sequence (5′-CTAGCATGACTGCAGTACGT (SEQ ID NO. 131)) and a 3′ region consisting of the sequence (5′-CTGTCTCTTATACACATCTGACGCTGCCGACGA (SEQ ID NO. 132)). Table 34 lists the SEQ ID NOs in rank order of the variable regions that are positioned between the 5′ and 3′ regions. The combined oligonucleotide probe library can be used to distinguish between aggressive breast cancer, non-aggressive breast cancer, and non-cancer plasma samples in a single assay according to the column “Comparison.” In the Comparison column, sequences elevated in group 1 as compared to group 2 are shown as group 1/group 2. The legend for this column is “ACP”: Aggressive cancer pool; “HP”: healthy & non-cancer pool; “NACP”: Non-aggressive cancer pool. By way of illustration, the first two sets of comparisons in Table 34 are labeled ACP/HP, which indicates that these oligonucleotides were observed at high copy numbers after probing the aggressive breast cancer sample pool versus the healthy/non-cancer sample pool. Continuing with this illustration, higher numbers of such oligonucleotide probes binding to a sample can indicate the presence of an aggressive breast cancer.

TABLE 34
Enrichment Scheme 1 Oligonucleotide
Probe Comparison and Variable Regions

| Comparison | SEQ ID NO. |
|---|---|
| HP/ACP | 2729-2737 |
| ACP/HP | 2738-2742 |
| ACP/NACP | 2743-2745 |
| NACP/ACP | 2746-2753 |
| NACP/HP | 2754 |
| HP/NACP | 2755-2763 |

[1276] Scheme 2

[1277] In this enrichment, the positive target is NACP plasma and the negative target is the HP plasma. The starting input library is the C-R8N-1 (i.e., previously enriched for a cancer pool with 48% of aggressive cancer samples; see description of the C-RN7 library in Example 26 with one additional round of positive selection performed). The microvesicle partitioning was performed using PEG precipitation. PCR amplification is done after each binding. The resulting library after this ninth (Round 9) round of enrichment is used for probing. Three different input criteria for used for round 9: 1) R9-2—library input 0.1 ng; 2) R9-1c—library input is Ing; 3) R9—5× input of competitor DNA. The R9-2 and R9-1c oligonucleotide libraries were then used for subsequent probing of the pooled samples (aggressive cancer, non-aggressive cancer and healthy). As above, comparisons performed included ACP/HP, HP/ACP, ACP/NACP, NACP/ACP, HP/NACP, NACP/HP.

[1278] Resulting oligonucleotides identified from the R9-1c and R9-2 oligonucleotide libraries in these selections are shown in Table 35 and Table 36, respectively. As in Table 27, the oligonucleotides each have a 5′ region consisting of the sequence (5′-CTAGCATGACTGCAGTACGT (SEQ ID NO. 131)) and a 3′ region consisting of the sequence (5′-CTGTCTCTTATACACATCTGACGCTGCCGACGA (SEQ ID NO. 132)). Tables 35 and 36 list the SEQ ID NOs in rank order of the variable regions that are positioned between the 5′ and 3′ regions. When combined, the oligonucleotide probe libraries can be used to distinguish between aggressive breast cancer, non-aggressive breast cancer, and non-cancer plasma samples in a single assay according to the column “Comparison.” In the Comparison column, sequences elevated in group 1 as compared to group 2 are shown as group 1/group 2. The legend for this column is “ACP”: Aggressive cancer pool; “HP”: healthy & non-cancer pool; “NACP”: Non-aggressive cancer pool. By way of illustration, the first two sets of comparisons in Table 35 are labeled ACP/HP, which indicates that these oligonucleotides were observed at high copy numbers after probing the aggressive breast cancer sample pool versus the healthy/non-cancer sample pool. Continuing with this illustration, higher numbers of such oligonucleotide probes binding to a sample can indicate the presence of an aggressive breast cancer.

TABLE 35
Enrichment Scheme 2 R9-1c Oligonucleotide
Probe Comparison and Variable Regions

| Comparison | SEQ ID NO. |
|---|---|
| ACP/HP | 2764-2791 |
| HP/ACP | 2792-2793 |
| ACP/NACP | 2794-2815 |
| NACP/ACP | 2816-2830 |
| HP vs NACP | 2831-2845 |
| NACP vs HP | 2846-2858 |

TABLE 36
Enrichment Scheme 2 R9-2 Oligonucleotide
Probe Comparison and Variable Regions

| Comparison | SEQ ID NO. |
|---|---|
| ACP/HP | 2859-2867 |
| HP/ACP | 2868-2892 |
| ACP/NACP | 2893-2904 |
| NACP/ACP | 2905-2938 |
| HP/NACP | 2939-2941 |
| NACP/HP | 2942-2950 |

[1279] Scheme 3

[1280] The positive target was the NACP plasma and the negative target was the HP plasma. The enrichment started with the naïve (non-enriched; NE) library. Microvesicles in the samples were isolated using PEG precipitation. Six rounds of enrichment were performed with PCR amplification performed after each round. The round alternated between a single selection of positive or negative selection (i.e., positive selection in rounds 1, 3, 5 and negative selection in rounds 2, 4, and 6). The resulting library after round 6 is used for probing of the pooled samples (aggressive cancer, non-aggressive cancer and healthy) with library input 0.1 ng. As above, comparisons performed included ACP/HP, HP/ACP, ACP/NACP, NACP/ACP, HP/NACP, NACP/HP.

[1281] Resulting oligonucleotides identified in these selections are shown in Table 37. As in Table 27, the oligonucleotides each have a 5′ region consisting of the sequence (5′-CTAGCATGACTGCAGTACGT (SEQ ID NO. 131)) and a 3′ region consisting of the sequence (5′-CTGTCTCTTATACACATCTGACGCTGCCGACGA (SEQ ID NO. 132)). Table 37 lists the SEQ ID NOs in rank order of the variable regions that are positioned between the 5′ and 3′ regions. The combined oligonucleotide probe library can be used to distinguish between aggressive breast cancer, non-aggressive breast cancer, and non-cancer plasma samples in a single assay according to the column “Comparison.” In the Comparison column, sequences elevated in group 1 as compared to group 2 are shown as group 1/group 2. The legend for this column is “ACP”: Aggressive cancer pool; “HP”: healthy & non-cancer pool; “NACP”: Non-aggressive cancer pool. By way of illustration, the first two sets of comparisons in Table 37 are labeled ACP/HP, which indicates that these oligonucleotides were observed at high copy numbers after probing the aggressive breast cancer sample pool versus the healthy/non-cancer sample pool. Continuing with this illustration, higher numbers of such oligonucleotide probes binding to a sample can indicate the presence of an aggressive breast cancer.

TABLE 37
Enrichment Scheme 3 Oligonucleotide
Probe Comparison and Variable Regions

| Comparison | SEQ ID NO. |
|---|---|
| ACP/HP | 2951-2960 |
| HP/ACP | 2961-2972 |
| ACP/NACP | 2973-2976 |
| NACP/ACP | 2977-2990 |
| HP vs NACP | 2991-3003 |
| NACP/HP | 3004-3017 |

[1282] Scheme 4

[1283] Starting aptamer library is C-R8N-3 (library previously enriched for Cancer pool with 48% of aggressive cancer samples and input 0.001 ng). Microvesicles in the samples were isolated using PEG precipitation. PCR amplification is done after each binding. There was only negative target used (the NACP), which is unique for the selection scheme versus the three above. This enrichment was meant to further enrich C-R8N library toward aggressive cancer targets by removing oligonucleotides specific to non-aggressive targets. Four negative selection rounds were performed. Two different input criteria for used for probing after round 13 (R13): 1) R13-3—library input 0.01 ng; 2) R13-4—library input 0.001 ng. The R13-3 and R13-4 oligonucleotide libraries were then used for subsequent probing of the pooled samples (aggressive cancer, non-aggressive cancer and healthy). As above, comparisons performed included ACP/HP, HP/ACP, ACP/NACP, NACP/ACP, HP/NACP, NACP/HP.

[1284] The variable regions of the resulting oligonucleotides identified from the R13-3 and R13-4 oligonucleotide libraries in these selections are shown in Table 38 and Table 39, respectively. As in Table 27, the oligonucleotides each have a 5′ region consisting of the sequence (5′-CTAGCATGACTGCAGTACGT (SEQ ID NO. 131)) and a 3′ region consisting of the sequence (5′-CTGTCTCTTATACACATCTGACGCTGCCGACGA (SEQ ID NO. 132)). Tables 38 and 39 list the SEQ ID NOs in rank order of the variable regions that are positioned between the 5′ and 3′ regions. When combined, the oligonucleotide probe libraries can be used to distinguish between aggressive breast cancer, non-aggressive breast cancer, and non-cancer plasma samples in a single assay according to the column “Comparison.” In the Comparison column, sequences elevated in group 1 as compared to group 2 are shown as group 1/group 2. The legend for this column is “ACP”: Aggressive cancer pool; “HP”: healthy & non-cancer pool; “NACP”: Non-aggressive cancer pool. By way of illustration, the first two sets of comparisons in Table 38 are labeled ACP/HP, which indicates that these oligonucleotides were observed at high copy numbers after probing the aggressive breast cancer sample pool versus the healthy/non-cancer sample pool. Continuing with this illustration, higher numbers of such oligonucleotide probes binding to a sample can indicate the presence of an aggressive breast cancer.

TABLE 38
Enrichment Scheme 4 R13-3 Oligonucleotid
Probe Comparison and Variable Regions

| | | Variable Region |
|---|---|---|
| Comparison | SEQ ID NO. | Sequence |
| ACP/HP | 3018-3030 | ACCATCGGGTCACGTAAA |
| | | AGCGGTTCTAATTTCTAA |
| HP/ACP | 3031-3043 | ACGCAGTGCCGCCGAATC |
| | | CTGATCCCCTAACTTTC |
| ACP/NACP | 3044-3052 | ACCACTGAACTCATGGTA |
| | | CTAATCACACACCAATT |
| NACP/ACP | 3053-3061 | ACTGACTGCATACATCCG |
| | | CATATTAAACCCGTATT |
| HP/ACP | 3062-3083 | ACGCCTGTACGATGTCCT |
| | | CGGTCTCATTTTATTTC |
| ACP/HP | 3084-3096 | ACTGCGGTCATCGAGTTA |
| | | CTGGCTATTGCCTGACC |

TABLE 39
Enrichment Scheme 4 R13-4 Oligonucleotide
Probe Comparison and Variable Regions

| | | Variable Region |
|---|---|---|
| Comparison | SEQ ID NO. | Sequence |
| ACP/HP | 3097-3099 | AATGCATTGCGTTATTTCAA |
| | | TTGAGGCGTCCTAAAA |
| HP/ACP | 3100-3107 | CATACGCACGGTCCTCTACT |
| | | ATAATTGTCCACCAA |
| ACP/NACP | 3108-3117 | AGCCCGTTGCTACGTTGCAG |
| | | TAGGTGTAACTTCACTGA |
| NACP/ACP | 3118-3130 | AGCGGTCACCGCCTATGGTT |
| | | ATTCATTTTTCTCTTA |
| HP/NACP | 3131-3141 | AGCCCGTTGCTACGTTGCAG |
| | | TAGGTGTAACTTCACTGA |
| NACP/HP | 3142-3150 | ACCACGTTGGTTATTGCCCT |
| | | GCTTTGAAGTCTTACGA |

### Example 30: Use of an Oligonucleotide Probe Library to Characterize Breast Cancer Samples

[1285] An oligonucleotide probe library comprising approximately 2000 different probe sequences was constructed and used to probe approximately 500 individual breast cancer and non-cancer samples. The probe sequences were derived from different screening experiments and are listed herein in SEQ ID NOs 137-969 and 1072-3150. The oligonucleotides listed in these tables were synthesized and pooled together. The samples were plasma samples from 212 breast cancer patients, 177 biospy confirmed non-cancer patients, and 117 normal control patients (self-reported as non-cancer). Experiments details are as provided above. The plasma samples were contacted with the oligonucleotide probe library and microvesicles were isolated using PEG precipitation. Oligonucleotides that were recovered with the microvesicles were isolated. Next Generation Sequencing (Illumina HiSeq) was used to identify the isolated sequences for each sample.

[1286] Analysis of significance of difference identified 18 aptamers with p-values below 0.01 when compared Cancer/Normal, 15 aptamers with p-values below 0.001 when compared cancer/Non-Cancer, 28 aptamers with p-values below 0.001 when compared Non-Cancer/Normal.

[1287] Multi-oligonucleotide panels were next constructed using a cross-validation approach. Briefly, 50 samples were randomly withheld from the sample cohort. The performance of individual oligonucleotides to distinguish the remaining cancers and non-cancer/normals was determined using logistic regression methodology. Additional oligonucleotides were added iteratively and performance was assessed using logistic regression until further performance improvements were no longer obtained with additional oligonucleotides. The approach generally led to panels of approximately 20-100 different probe sequences. The constructed panels were then used to classify the 50 withheld samples and diagnostic performance was assessed using Receiver Operating Curve (ROC) analysis and estimation of the Area Under the Curve (AUC).

[1288] In approximately 300 rounds of cross-validation, the average AUC was 0.6, thus showing that the average performance was statistically better than random (i.e., AUC of 0.5) and that the probe library could distinguish breast cancer and non-breast cancer/normal patient samples. AUC values as high as 0.8 were observed for particular cross validations. FIGS. 16A-B illustrate a model generated using a training (FIG. 16A) and test (FIG. 16B) set from a round of cross validation. The AUC was 0.803. The variable regions of the sequences used to build this model are shown in Table 40. Another exemplary round of cross-validation is shown in FIGS. 16C-D. The AUC was 0.678.

[1289] The SEQ ID NOs. of the sequences used in the model in FIGS. 16A-B are listed in rank in Table 40. As in Table 27, the oligonucleotides were synthesized with a 5′ region consisting of the sequence (5′-CTAGCATGACTGCAGTACGT (SEQ ID NO. 131)) and a 3′ region consisting of the sequence (5′-CTGTCTCTTATACACATCTGACGCTGCCGACGA (SEQ ID NO. 132)) flanking the variable regions.

TABLE 40
Oligonucleotide Probe Variable Regions
Rank Ordered SEQ ID NOs

215, 1286, 961, 1837, 780, 1319, 3032, 626, 2816, 1311, 364, 3102, 3115, 886, 414, 517, 599, 246, 416,
223, 507, 586, 1455, 1560, 1241, 2771, 1513, 2994, 2757, 461, 1917, 1178, 299, 1409, 959, 785, 322,
636, 1244, 665, 592, 823, 168, 1183, 3000, 182, 534, 1580, 2753, 2989, 1957, 2829, 1960, 856, 3149,
283, 1551, 1974, 605, 363, 266, 3140, 2242, 1306, 652, 634, 2763, 1270, 1728, 893, 1266, 1372, 1141,
1731, 1197, 1649

[1290] The data presented in this Example demonstrate that an oligonucleotide pool comprising members having the variable regions listed in SEQ ID NOs 137-969 and 1072-3150, e.g., a pool of probes having the variable regions listed in Table 40, can be used to distinguish plasma from individuals having breast cancer versus plasma from non-breast cancer individuals.

### Example 31: Updated Oligonucleotide Pools to Characterize Breast Cancer Samples

[1291] The profiling of 500 clinical samples with an oligonucleotide probe library comprising 2000 oligonucleotides showed significant ability to distinguish breast cancer from non-cancer control samples. See Example 30 above. When performing cross-validation in these experiments, it was observed that 85 out of 500 were misclassified at a higher rate compared to the other samples. We therefore identified another selection of oligonucleotide probe which were able to correctly classify the noted samples. These 85 samples were profiled with a naïve oligonucleotide probe library (6-3S/8-3S), and enriched on breast cancer and non-cancer plasma using methodology presented in the Examples above. The selected oligonucleotides were compared to a positive controls cohort, which comprised of the cancer and non-cancer samples that were consistently classified correctly within the experiments in Example 30 above. Oligonucleotides were selected based on absolute number of copies sequenced of at least 50 and various criteria when comparing sample groups including: 1) copy number fold-change (fc) of at least 1.2; 2) effect size (es) above 0.6; 3) t-test (p-value <=0.05); and 4) Kolmogorov-Smirnov test (ks) (p-value <=0.05). Effect size is a population effect size calculated as (mean(group1)−mean(group2))/standard deviation(group1 and group2).

[1292] The profiling data were normalized by dividing the count of each particular oligonucleotide by the total counts for particular sample and multiplying by the global mean across the entire experiment. These normalized values were used to calculate the statistical criteria specified above to compare the following samples type: Misclassified Cancer (“C”), misclassified non-cancer (“NC”), positive control Cancer (“C-P”), positive control Non-Cancer (“NC-P”), misclassified Normal (“N”). The comparisons performed and numbers of resulting oligonucleotides are shown in Table 41. Negative controls are oligonucleotides that did not match any criteria and thus should not distinguish be any samples groups.

TABLE 41
Oligonucleotide probe candidates were
selected from the following comparisons

| Specificity | Total |
|---|---|
| C/NC-P* A** and C/NC-P B*** | 82 |
| C/NC-P A | 108 |
| C/NC-P B | 13 |
| Negative control | 60 |
| C-P/NC A C-P/NC B | 34 |
| C-P/NC A | 68 |
| C-P/NC B | 101 |
| NC/C-P A NC/C-P B | 7 |
| NC/C-P A | 196 |
| NC-P/C A NC-P/C B | 65 |
| NC-P/C A | 83 |
| NC-P/C B | 55 |
| C + C-P/N | 103 |
| N/C + C-P | 25 |
| Total | 1000 |

*“C/NC-P” in Table 41 means that oligonucleotides were selected with specificity toward cancer (“C”) while compared to Non-Cancer positive (“NC-P”) control.
A**- selection criteria: counts > 50, fc ≥ 1.2, es > 0.6, ttest p < 0.05,
B***- selection criteria: counts > 200, estimated sample size < 71, fc > 1.2, ttest/ks test p < 0.05.

[1293] The sequences selected based on Table 41 are shown in Table 42. As in Table 27, the oligonucleotides each have a 5′ region consisting of the sequence (5′-CTAGCATGACTGCAGTACGT (SEQ ID NO. 131)) and a 3′ region consisting of the sequence (5′-CTGTCTCTTATACACATCTGACGCTGCCGACGA (SEQ ID NO. 132)). Table 42 lists in rank order the SEQ ID NOs of the variable regions that are positioned between the 5′ and 3′ regions. The column “Specificity” shows the specificity of the oligonucleotides based on the comparisons in Table 41.

TABLE 42
Oligonucleotide Probe Variable Regions

| Specificity | SEQ ID NO. |
|---|---|
| C/NC-P A and C/NC-P B | 3151-3232 |
| C/NC-P A | 3233-3340 |
| C/NC-P B | 3341-3353 |
| Negative control | 3354-3368 |
| C-P/NC A C-P/NC B | 3369-3402 |
| C-P/NC A | 3403-3470 |
| C-P/NC B | 3471-3571 |
| Negative control | 3572-3586 |
| NC/C-P A NC/C-P B | 3587-3593 |
| NC/C-P A | 3594-3789 |
| Negative control | 3790-3804 |
| NC-P/C A NC-P/C B | 3805-3869 |
| NC-P/C A | 3870-3952 |
| NC-P/C B | 3953-4007 |
| Negative control | 4008-4022 |
| C/N | 4023-4125 |
| N/C | 4126-4150 |

[1294] The 1000 selected oligonucleotides are synthesized as DNA with a 5′ biotinylation. The synthesized oligonucleotides are pooled with 1000 of the most informative aptamers from the profiling performed in Example 30 to create a further optimized oligonucleotide probing library that can be used to distinguish cancer and normal samples.

### Example 32: Comparison of Oligonucleotide Pools

[1295] In this Example, the performance of the oligonucleotide pool from Example 30 was compared to the performance of the oligonucleotide pool from Example 31 to characterize breast cancer samples. In this Example, the oligonucleotide pool from Example 30 is referred to as the 2000v1 and the oligonucleotide pool from Example 30 is referred to as the 2000v2. A random forest approach was used to analyze the data, which data was obtained for the 2000v1 library in Example 30. The 2000v2 data was obtained via tested on a cohort of 858 plasma samples which comprised some samples described in Example 30 with additional samples according to three groupings: 194 breast cancer positive, 382 breast cancer negative as confirmed by biopsy (“non-cancer”), and 282 self declared normals (“normal”).

[1296] ROC curves are shown in FIGS. 22A-D for the various settings. AUC values are shown above the curve and are statistically significant from random (i.e., AUC=0.5) in all cases. In FIG. 22A, the 2000v1 probe library was used to distinguish cancer samples versus biopsy confirmed non-cancer samples. In FIG. 22B, the 2000v2 probe library was used to distinguish the same sample groupings. A small improvement in AUC was observed with the 2000v2 probe library in this setting. In FIG. 22C, the 2000v1 probe library was used to distinguish cancer samples versus self-declared normal samples. In FIG. 22D, the 2000v2 probe library was used to distinguish the same sample groupings. A small decline in AUC was observed with the 2000v2 probe library in this setting. Highly stringent

[1297] The SEQ ID NOs. of the variable regions of informative oligonucleotides from the 2000v1 and 2000v2 libraries are listed in Table 43. As above, the oligonucleotides were synthesized with a 5′ region consisting of the sequence (5′-CTAGCATGACTGCAGTACGT (SEQ ID NO. 131)) and a 3′ region consisting of the sequence (5′-CTGTCTCTTATACACATCTGACGCTGCCGACGA (SEQ ID NO. 132)) flanking the variable regions. The listed oligonucleotides were used in the Random Forest modeling to generate AUC values, e.g., as shown in FIGS. 22A-D, and are listed in rank order. The row “Common” in Table 43 shows overlapping informative sequences from the 2000v1 and 2000v2 settings.

TABLE 43
Informative oligonucleotide probes

| Setting | SEQ ID NO. |
|---|---|
| 2000v1 | 1102, 624, 3032, 597, 2831, 1923, 706, 752, 1188, 238, 605, 2809, 651, 611, 2830, 1163, 1187, |
| | 1106, 421, 843, 1186, 1100, 1235, 3140, 173, 1243, 289, 178, 3035, 1080, 890, 1225, 1995, 508, |
| | 183, 435, 2584, 2795, 1814, 1924, 3075, 939, 1183, 431, 938, 1731, 1095, 446, 623, 1732, 3024, |
| | 216, 626, 672, 457, 830, 1497, 777, 610, 3038, 1460, 665, 1079, 148, 1445, 885, 1697, 1197, |
| | 1769, 965, 164, 838, 606, 3018, 493, 1830, 859, 2047, 1837, 404, 1693, 1201, 899, 264, 841, |
| | 1678, 1949, 628, 354, 1523, 3036, 495, 727, 1997, 676, 546, 1507, 615, 616, 3096, 1435, 1194, |
| | 1195, 698, 660, 1994, 1123, 290, 934, 428, 715, 751, 3064, 602, 345, 662, 1820, 586, 241, 929, |
| | 1136, 316, 803, 3095, 936, 1381, 537, 254, 1119, 1652, 1955, 1534, 2965, 496, 405, 757, 612, |
| | 145, 1248, 599, 942, 505, 907, 1353, 2786, 1509, 211, 1170, 736, 486, 815, 540, 1540, 1250, |
| | 3000, 2971, 348, 3108, 445, 1548, 1723, 888, 1284, 604, 858, 1372, 1083, 584, 767, 3135, 855, |
| | 2730, 805, 1557, 565, 1600, 920, 2330, 1977, 710, 1220, 1907, 441, 795, 1939, 1386, 908, 2986, |
| | 350, 552, 2953, 3134, 250, 765, 827, 1216, 526, 969, 1903, 693, 650, 1359, 789, 747, 826, 2002, |
| | 1291, 639, 1244, 573, 3119, 523, 594, 854, 898, 429, 1881, 569, 1538, 848, 738, 911, 669, 909, |
| | 329, 577, 2964, 272, 648, 1481, 1719, 816, 2981, 533, 2748, 1660, 3050, 755, 1706, 1504, 3059, |
| | 1276, 1547, 2732, 922, 2977, 2952, 1522, 1273, 1399, 1556, 2998, 853, 1256, 845, 625, 2005, |
| | 2987, 2985, 1327, 807, 923, 1500, 1331, 2497, 641, 1282, 1940, 629, 2970, 1150, 1915, 1862, |
| | 389, 1304, 2979, 3061, 1328, 2740, 819, 353, 396, 2983, 1164, 3029, 1566, 2041, 2972, 966 |
| 2000v2 | 4116, 171, 3280, 3401, 3879, 1175, 3291, 651, 3343, 592, 3110, 3682, 605, 3231, 3556, 389, 624, |
| | 399, 3173, 3483, 795, 3918, 211, 309, 3595, 4101, 3780, 1169, 803, 1392, 3332, 415, 3652, 1610, |
| | 3262, 163, 1477, 4044, 3319, 722, 3607, 3414, 564, 511, 826, 431, 4052, 3329, 692, 3153, 295, |
| | 1548, 635, 3900, 370, 3698, 342, 3545, 614, 178, 3699, 467, 3307, 770, 4055, 3912, 164, 3232, |
| | 4048, 2762, 3856, 2587, 421, 3683, 3000, 633, 3712, 3466, 3769, 3537, 4058, 4018, 2808, 4026, |
| | 3785, 4083, 3151, 1288, 4050, 3560, 3786, 1121, 3742, 3128, 4132, 1171, 3619, 3471, 566, 3751, |
| | 4110, 4091, 787, 1176, 3735, 538, 240, 3064, 2754, 3035, 199, 3777, 831, 1247, 1188, 3667, |
| | 3086, 3741, 3650, 1272, 3402, 3317, 3618, 1466, 1590, 3489, 3659, 1091, 3601, 4023, 1469, |
| | 1777, 2008, 4059, 1593, 4062, 205, 2838, 3087, 2835, 3661, 1661, 3551, 3612, 1322, 3629, 3789, |
| | 2017, 1325 |
| Common | 1188, 3064, 421, 624, 389, 803, 431, 826, 3035, 164, 178, 651, 3000, 1548, 211, 605, 795 |

[1298] The data presented in this Example demonstrate that an oligonucleotide pool comprising members having the variable regions listed in SEQ ID NOs 137-969 and 1072-4150, e.g., a pool of probes having the variable regions listed in Table 43, can be used to distinguish plasma from individuals having breast cancer versus plasma from non-breast cancer individuals.

### Example 33: Photo-Cleavable Biotin Mediated Purification of an Oligonucleotide Library

[1299] Tag probe and capture probe detection systems may have advantages in the read-out of oligonucleotide-based assays since such systems allow direct quantification of oligonucleotides without amplification. Amplification may introduce amplification bias, e.g., wherein some sequences are preferentially amplified versus others. One such system is the nCounter nucleic acid detection system from NanoString Technologies, Inc. (Seattle, Wash.). This system can be used to detect oligonucleotide probes of the invention. See, e.g., FIG. 14G and related discussion. Current applications of tag and capture probe detection systems include gene expression analysis, RNA:Protein analysis; single cell gene expression analysis; miRNA expression analysis, miRGE analysis, copy number variation analysis, IncRNA expression analysis; ChiP-String expression analysis. See, e.g., www.nanostring.com/applications/.

[1300] In this Example, we improved using the Nanostring system to detect the oligonucleotide probe libraries of the invention. As described above, a pre-enriched oligonucleotide probe library is contacted with a biological sample such as plasma, and microvesicles bound by various oligonucleotide probes are precipitated, e.g., with PEG. Thus, the oligonucleotide probe library is present in the mix with PEG/proteins. This mixture is compatible with PCR steps used for next-generation sequencing (NGS) preparation, but the Nanostring system may not detect probes in these mixtures. Without being bound by theory, this interference may be due to noted impurities with hybridization of the probes and other oligonucleotides used in purifications steps. We developed a protocol for purification of post-probing oligonucleotide probe library, which utilizes photo-cleavable (PC) Biotin (see, e.g., www.idtdna.com/site/Catalog/Modifications/Product/2291; references 1-4) and thus allows oligonucleotide probe detection using the Nanostring tag-capture system.

[1301] The steps of the purification of post-probing oligonucleotide probe library are shown in schematic 1700 in FIG. 17A and include the following: (i) modification of the 5′-end of each member of the oligonucleotide library with photocleavable-Biotin (PC-Biotin) 1701 via PCR with a PC-Biotinylated primer to create PC-Biotinylated aptamer library 1702; (ii) probing of plasma samples using the PC-Biotinyltated oligonucleotide probe library followed by PEG precipitation as described herein, resulting in a pellet 1703 which contains, inter alia, bound oligonucleotide library members, proteins and microvesicles 1705, and PEG; (iii) heat denaturing of the re-suspended pellet to break oligonucleotide/protein interactions and make PEG less viscous before mixing with streptavidin beads 1704; (iv) after short incubation with streptavidin beads 1704 to allow library 1702 to bind to the beads 1706, washing of the beads to remove impurities; (v) UV photo-cleavage 1707 of the spacer between the PC-Biotin and oligonucleotide molecules, capturing the beads 1708 using a magnet and collecting the released oligonucleotide library 1709 in the solution; and (vi) Nanostring 1710 sample preparation according to the manufacturer's instructions. In FIG. 17A, “PCB” refers to photocleavable biotin, oligonucleotide library members are referred to as “AL,” “Str. Beads” refers to streptavidin beads, and “NS” refers to the Nanostring assay. The steps above are identified in the plot.

[1302] FIG. 17B show a 4% agarose gel with results of photocleavable biotin library cleavage test with Streptavidin protein. Lane 1 is a 50 bp DNA ladder and lane 10 is a Control with no biotin library with Streptavidin protein. The gel shows that both biotinylated (“B”) and photo-cleavable biotinylated (“PC-B”) modified oligonucleotides were bound to Streptavidin, which resulted in slower mobility in gel (lanes 4 and 5) as compared to the unbound oligonucleotides (lanes 2 and 3). After exposure to 365 nm UV radiation, the PC-B oligonucleotides were photo-cleaved, which resulted in faster mobility in gel and returning to the original molecular weight (i.e., before mixing with Streptavidin protein) (lanes 7-9, where minutes UV exposure are indicated). In contrast, no change to the B oligonucleotides was observed after 10 min exposure to UV (lane 8). These results demonstrate that the photocleavable biotin library can be captured by streptavidin beads and released by UV-mediated cleavage.

[1303] To test the workflow, a pool of plasma from patients with breast cancer and another pool of plasma from healthy donors were probed with an oligonucleotide library comprising 100 oligonucleotide probes, 50 of which were selected as cancer specific and other 50 were selected as equivalent binders to both types of samples (i.e., “neutral”). The Nanostring probe system 1720 was designed as in FIG. 17C. See FIG. 14G and description thereof for further details of the Nanostring probe system. The “Nanostring Probe A” 1722 and “Nanostring Probe B” 1727 were designed in part as reverse complements to the oligonucleotide probe library members of the invention (labeled “Aptamer” 1724 in the figure). As can be seen in FIGS. 17D-E, relevant Nanostring counts were obtained for the photocleavable oligonucleotide library (min relevant count is 300). Furthermore, the oligonucleotide probes selected as binders (“Binder”) for the cancer pool (“CP”), indeed show stronger binding to the cancer pool as compared to counts from healthy pool (“HP”). The binding ratio between cancers and normal was ˜5.25. For oligonucleotide probes selected as neutral binders (“Neutral”), there was no relevant difference between the cancer pool and healthy pool.

[1304] The Nanostring protocol uses hybridization of target specific probes. We tested 100 different oligonucleotide probes, which are complementary to portion of each specific oligonucleotide, as well as universal Primer probe for Nanostring detection using the above procedure. Following the standard Nanostring detection protocol, all probes were mixed with recovered and purified library, hybridized overnight and efficiently detected using the Nanostring tag-capture probe approach. In contrast, without purification no quantification of oligonucleotides with Nanostring was observed (data not shown).

[1305] In this Example, we established a process for oligonucleotide probe library purification after probing test samples. This process is efficient, low cost, can be accomplished in short time frame, and can be used for any purpose when library needs to be purified from probing product directly and quickly, given no biotin labeling is needed in downstream applications.

### References

[1306] 1. Photocleavable biotin derivatives: a versatile approach for the isolation of biomolecules. Proc Natl Acad Sci USA. 1995, 16, 7590-7594.
[1307] 2. Photocleavable biotin phosphoramidite for 5′-end-labeling, affinity purification and phosphorylation of synthetic oligonucleotides. Nucleic Acids Res. 1996, 2, 361-366.
[1308] 3. Photocleavable affinity tags for isolation and detection of biomolecules. Methods Enzymol. 1998, 291, 135-154.
[1309] 4. Matrix-assisted laser desorption/ionization mass spectrometry of DNA using photocleavable biotin. Biomol Eng. 1999, 16, 127-133.

### Example 34: Single Stranded DNA (ssDNA) Oligonucleotide Library Preparation for Library Development

[1310] The preparation of high yield and high quality ssDNA libraries is a critical step in SELEX (Systematic Evolution of Ligands by EXponential enrichment) [1, 2] as well as in other biological applications, such as DNA chips and microarrays [3], and single-stranded conformation polymorphism technique (SSCP) [4]. The standard approach for preparing ssDNA libraries includes PCR amplification to first generate a double stranded (dsDNA) library, followed by ssDNA separation and purification. Several strategies of ssDNA preparation have been developed to date, each with advantages and disadvantages:

[1311] Lambda Exonuclease Digestion [2, 5-7]

[1312] The dsDNA standard PCR product is followed by Lambda exonuclease to digest the complementary strand and leave the target ssDNA. ssDNA purification is then performed to remove enzymes and unwanted buffer.

[1313] Advantages:

[1314] Regular PCR amplification has high yield in generating dsDNA.

[1315] Disadvantages:

[1316] The purity of final ssDNA is limited by enzyme digestion efficiency. Also dsDNA needs to be purified prior to digestion, together with post-digestion purification there will be two purifications, which results in substantial loss of input material. The digestion usually requires at least 2 hours. The digestion rate may not be consistent.

[1317] Asymmetric PCR [8, 9]

[1318] The procedure generates target ssDNA as the main product and less dsDNA products and non-target ssDNA. The band corresponding to the target ssDNA is cut from a native gel.

[1319] Advantages:

[1320] The final ssDNA product potentially has high purity.

[1321] Disadvantages:

[1322] Separation of strands is possible in the native gel, but the yield is typically low and the presence of non-target strand cannot be excluded. The yield cannot be increased on denaturing gel because the strands have the same length.

[1323] Biotin-Streptavidin Magnetic Beads Separation [10, 11]

[1324] The non-target PCR primer is biotinylated so final PCR products are Biotinylated-dsDNA, which can be captured by streptavidin magnetic beads and denatured to release the non-biotin labeled target ssDNA.

[1325] Advantages:

[1326] The final ssDNA product has relatively high purity.

[1327] Disadvantages:

[1328] In most cases, the input library needs to be biotinylated, but it may be difficult to replace or release the captured target strands from streptavidin beads. Post-denaturing purification is required to remove NaOH and/or acid used for neutralization.

[1329] Unequal Primer Length PCR [12]

[1330] The non-target PCR primer has a chemical modified spacer and a few extra nucleotides following. In the PCR reaction, the DNA polymerase will stop at the spacer, resulting in unequal length of PCR dsDNA product. Then target ssDNA can be cut from a denaturing PAGE gel.

[1331] Advantages:

[1332] The final ssDNA product has high purity because the target ssDNA is not mixed with non-target strands.

[1333] Disadvantages:

[1334] ssDNA cannot be seen on native gel. Requires time consuming denaturing PAGE gel. It may be difficult to denature some dsDNA library, which can limit the final yield.

[1335] Indirect Purification Method [13]

[1336] The indirect purification strategy combines Asymmetric PCR and Biotin-streptavidin magnetic beads separation. In short, regular PCR is used to generate sufficient template, then asymmetric PCR with excess of target primer and less biotinylated complementary primers, followed by biotin-streptavidin separation.

[1337] Advantages:

[1338] May increase yield and purity of ssDNA product.

[1339] Disadvantages:

[1340] It cannot produce biotinylated target ssDNA library. The process is relatively long and complicated and may be prone to generate mutants of the original sequence.

[1341] The invention provides methods of enriching oligonucleotide probe libraries against a target of interest. As the probes comprise ssDNA, the process may comprise PCR amplification then conversion back into ssDNA after each round of enrichment. In this Example, we developed a strategy for preparation of a ssDNA oligonucleotide library. The goals were to develop a process that is efficient and quick, while delivering high quality/purity ssDNA. We aimed to combine PCR and ssDNA prep in one step, remain efficient in the presence of selection buffer, target molecules, other sample components (e.g., highly abundant proteins for plasma samples) and other assay components (e.g., PEG precipitation solution that may be used to precipitate microvesicles). In addition, we desired the method to be able to generate ssDNA library with any modification, including without limitation Biotin.

[1342] We have used an optimized version of Lambda exonuclease digestion protocol for preparation of ssDNA oligonucleotide library. However, the digestion yield limits the overall recovery and is not consistent between different library preparations. In some cases, the ssDNA band is hardly visible on the gel following digestion. We have also observed incomplete digestion of dsDNA in the ssDNA product. In this Example, we developed an alternative protocol, termed “ssDNA by Unequal length PRimer Asymmetric PCR,” or SUPRA. It lacks disadvantages from the known methods listed above, and provides high quality and yield up to 10× higher yield of ssDNA oligonucleotide library as compared to the previous methods. It is relatively fast and convenient technically, since target ssDNA can be distinguished from non-target DNA on a gel.

[1343] A schematic comparing standard PCR 1800 and unequal length PCR 1810 is shown in FIG. 18A. In regular PCR 1800, a forward primer 1801 and reverse primer 1803 are hybridized with the reverse strand of an aptamer library 1802. The PCR reaction is performed, thereby creating equal length forward 1804 and reverse strands 1802. The strands are denatured in equal length single strands 1805. In unequal length PCR 1801, a forward primer 1811 having a lengthener segment and terminator segment and a reverse primer 1813 are hybridized with the reverse strand of an aptamer library 1812. The PCR reaction is performed, thereby creating unequal length forward 1814 and reverse strands 1812. The strands are denatured into unequal length single strands 1814 and 1812 that can be separated by size, e.g., on a denaturing gel.

[1344] The steps of SUPRA include: (i) Modification of regular non-target primer with two Isp9 (Internal Spacer 9; triethylene glycol spacer) as terminator and 32 extra nucleotides (e.g., poly-A) as lengthener. It is referred as Unequal-Forward-Double isp9 primer (UF-D9); (ii) Perform asymmetric PCR, by mixing DNA template, UF-D9 and regular target (reverse) primer at ratio that favors the reverse primer, e.g., 1:37.5. The PCR program has longer elongation step (e.g., 3 min instead of standard 1 min) and more cycles due to linear amplification mode (instead of exponential). The PCR product contains a majority of target ssDNA and small portion of dsDNA. (iii) Mix PCR reaction products 1:1 with denaturing buffer (e.g., 180 mM NaOH and 6 mM EDTA) and denature samples by heating (e.g., 70° C. for 10 min) and cooling (e.g., incubation on ice for 3 min); (iv) Run denatured products in denaturing buffer on an agarose gel stained with SybrGold. The non-target strand, which is longer due to the lengthener, will appear as upper band (if visible) and the target strand (strong lower band) is cut and purified. The process can include optional steps, including without limitation: (v) Weigh the gel pieces and purify ssDNA from the gel pieces (e.g., using the ssDNA Nucleospin kit or the like); (vi) quantification of the yield and native gel can be used to check the purity and yield of final product (e.g., using the ssDNA Qubit kit or the like).

[1345] The first step (i) uses a specific design of the forward primer with efficient terminator and lengthener, which creates non-target strand of unequal length. The DNA polymerase used to build the target strand will stop polymerization once it reaches the terminator, and the lengthener facilitates differentiation between the target and non-target strands. In the second step (ii), the ratio between the two primers is shifted toward the reverse primer, to produce a majority of target ssDNA. The ratio, however, should not limit double strand templates production to keep reaction running. FIG. 18B is a gel showing titration of forward and reverse primers input in asymmetrical PCR. The optimal condition, at which target strand is clearly visible, is in the range 1:20-1:50 F:R primers ratio. As shown in the figure, the ratio between two primers in asymmetric PCR can affect dsDNA and ssDNA amount in final products. The PCR thermocycler program is also adjusted to provide efficiency in the asymmetric PCR. In the third step (iii), a reliable denaturing method is used to separate target ssDNA to ensure the final yield and high purity.

[1346] As desired, the final step (vi) estimates the ratio of residual dsDNA, e.g., using ssDNA Qubit kit. In cases where the yield is not critical, the denaturing steps (iii and iv) can be skipped and the PCR products can be directly run on native gel. There will be a dsDNA band, but lower MW target ssDNA band can be distinguished and purified from gel. This is also a way to visualize the target band directly after PCR for a quality check or purification without denaturing. The purity of final product will be the same but yield will be lower.

[1347] A comparison of native versus denatured gel purification is shown in FIG. 18C. A post-probing oligonucleotide probe library was PCRed using unequal length primers mixed at a ratio of 1:38 (Forward/Reverse). In the figure, the left lane on each gel is a 50 bp molecular weight ladder and the lower band is the reverse primer. The positions of the dsDNA and ss DNA are indicated. A native gel showed the presence of both dsDNA and ssDNA (target strand) (FIG. 18C, panel A). Here, part of the target reverse strand is migrating in dsDNA. Thus, using the native gel, one can purify target ssDNA with moderate recovery. When a higher yield is desired, the PCR products can be run on denaturing agarose gel as described above. This approach provides maximal recovery wherein only target strand is visible, and can be cut from gel and purified (FIG. 18C, panel B). In this case, the reverse strand ssDNA, which is part of the dsDNA on native gel (FIG. 18C, panel A), is denatured and migrates together with other free molecules of target ssDNA strand, while forward strand becomes invisible due to limited amplification.

[1348] Compared to standard asymmetric PCR, which has relatively low yield and does not allow to distinguish target and non-target strands on denaturing gel, SUPRA delivers different lengths of target and non-target that can be purified on both native gel and denaturing gels. Compared to unequal primer length PCR, which uses lengthy Urea-PAGE protocol and produces only dsDNA, SUPRA has less dsDNA and free target ssDNA can be cut even from native gel if yield is not critical.

[1349] SUPRA has been used in the oligonucleotide probe library enrichment methods provided by the invention. The method is robust. In the presence of enrichment buffer, target/non-target molecules, proteins, exosomes/microvesicles, PEG and other components, SUPRA provides high quality and quantity of the ssDNA oligonucleotide library.

### References

[1350] 1. Comparison of different methods for generation of single-stranded DNA for SELEX processes. Anal. Bioanal. Chem. 2012, 404, 835-842.
[1351] 2. Upgrading SELEX Technology by Using Lambda Exonuclease Diogestion for Single-Straded DNA Generation. Molecules 2010, 15, 1-11.
[1352] 3. Tang, K.; Fu, D. J.; Julien, D.; Braun, A.; Cantor, C. R.; Koster, H. Chip-based genotyping by mass spectrometry. Proc. Natl. Acad. Sci. USA 1999, 96, 10016-10020.
[1353] 4. Kuypers, A. W.; Linssen, P.C.; Willems, P.M.; Mensink, E. J. On-line melting of double-stranded DNA for analysis of single-stranded DNA using capillary electrophoresis. J. Chromatogr. B Biomed. Appl. 1996, 675, 205-211.
[1354] 5. Higuchi, R. G.; Ochman, H. Production of single-stranded DNA templates by exonuclease digestion following the polymerase chain reaction. Nucleic Acids Res. 1989, 17, 5865.
[1355] 6. Jones, L. A.; Clancy, L. E.; Rawlinson, W. D.; White, P.A. High-affinity aptamers to subtype 3a hepatitis C virus polymerase display genotypic specificity. Antimicrob. Agents Chemother. 2006, 50, 3019-3027.
[1356] 7. S. S. Oh, K. Ahmads, M. Cho, Y. Xiao, H. T. Soh, “Rapid, Efficient Aptamer Generation: Kinetic-Challenge Microfluidic SELEX,” presented in the 12th Annual UC Systemwide Bioengineering Symposium, Jun. 13˜15, 2011, Santa Barbara, U.S.A
[1357] 8. Gyllensten, U. B.; Erlich, H. A. Generation of single-stranded DNA by the polymerase chain reaction and its application to direct sequencing of the HLA-DQA locus. Proc. Natl. Acad. Sci. USA 1988, 85, 7652-7656.
[1358] 9. Wu, L.; Curran, J. F. An allosteric synthetic DNA. Nucleic Acids Res. 1999, 27, 1512-1516.
[1359] 10. Espelund, M.; Stacy, R. A.; Jakobsen, K. S. A simple method for generating single-stranded DNA probes labeled to high activities. Nucleic Acids Res. 1990, 18, 6157-6158.
[1360] 11. A. Paul, M. Avci-Adali, G. Ziemer, H. P. Wendel. Streptavidin-coated magnetic beads for DNA strand separation implicate a multitude of problems during cell-SELEX. Oligonucleotides 2009, 19, 243-254.
[1361] 12. Williams K., Bartel D. PCR product with strands of unequal length. Nucleic Acids Research, 1995, Vol. 23, No. 20.
[1362] 13. Indirect purification method provides high yield and quality ssDNA sublibrary for potential aptamer selection. Anal. Biochem. 2015, online available.

### Example 35: Liquid Biopsy for Detection of Breast Cancer

[1363] Improved technologies capable of characterizing system-wide changes associated with complex diseases will be required to be able to detect millions of proteins and their isoforms as well as multi-molecular complexes. In the Examples above, we identified a liquid biopsy approach to detect breast cancer. See, e.g., Examples 30-31. Here, we provide another approach to developing liquid biopsy test to detect breast cancer. In the Examples above, the sample used for enrichment comprised pools plasma samples. In this Example, we performed enrichment separately on individual breast cancer plasma samples.

[1364] The enrichment workflow is shown in FIGS. 23A-B. FIG. 23A illustrates positive selection on cancer samples 2300. In Step 1) 2301, a random ssODN library 2302 (˜10¹³ biotinylated ssODN species) was trained towards cancer specificity (positive selection) by incubating with plasma 2303 from cancer patients to create mixture 2304. In Step 2) 2305, aptamer bound to exosomes in mixture 2304 were recovered using polyethylene glycol (PEG) followed by PCR. In Step 3) 2306, the supernatant is discarded 2307 and the pellet comprising aptamers from the input library 2302 which bound plasma constituents 2303 is recovered 2308. In Step 4 (not shown), the recovered aptamers are amplified by PCR, which may then be used as the input ssODN library 2302 in another round of positive selection, or for negative selection, as desired. FIG. 23B illustrates the workflow 231 for counter selection, or negative selection, on non-cancer control samples. This step can serve to remove aptamers that bind to common targets in all plasma samples, or other such non-specific aptamers. In Step 1 2311, the library 2312 is incubated with plasma from healthy and biopsy negative donors 2313 to create mixture 2314. In Step 2) 2315, aptamer bound to exosomes in mixture 2314 were precipitated using polyethylene glycol (PEG). In Step 3) 2316, the supernatant comprising unbound aptamers 2317 was collected and the precipitate was discarded 2318. In Step 4) 2319, the unbound aptamers 2317 were captured with biotinylated magnetic beads 2320 and recovered by magnetic force 2321. In the experiments in this Example, positive and counter selection iterations were performed for 12 rounds. Using this process, a total of 12 libraries were trained toward individual breast cancer patients thereby generating 12 enriched libraries. The 12 breast cancer samples used comprised four ER+/HER2− (ductal and lobular), HER2+ and triple negative (TNBC) samples.

[1365] As noted above, polyethylene glycol (PEG) was used to precipitate exosomes and any bound exosomes. We verified that this process recovered exosomes using several lines of experimentation. First, Western blot with anti-CD9 antibodies detected the exosomal CD9 target protein in plasma exosomes precipitated with PEG. As a positive control we used exosomes from the VCaP cell line isolated via ultracentrifugation (UC). Next, we used transmission electro microscopy (TEM) to generate images of PEG precipitated exosomes visualized by anti-CD9 antibody coupled gold-nanoparticles. Finally, we compared dynamic light scattering (DLS) of plasma exosome size distribution isolated by PEG precipitation, UC (positive control) and exosome-free HSA solution (negative control). These experiments showed that PEG precipitation generated the expected exosomal population at ˜100 nm similar to UC.

[1366] We then examined whether the enriched libraries bind to exosomal proteins, also using several lines of experiments. First, we incubated that enriched libraries with increasing titers of exosomes purified from cell cultures and spiked into human plasma samples. We observed that the number of sequences from the enriched libraries that were recovered increased with the amount of spiked exosomes. We next incubated phycoerythrin labeled unenriched and enriched libraries with plasma exosomes. Flow cytometry revealed preferential binding of the enriched library to plasma exosomes as compared to the unenriched library. We used mass-spectrometry to examine proteins that affinity purified from plasma with unenriched and enriched libraries. These experiments revealed very few non-exosomal proteins (NE) and several types of exosomal proteins associated with the proteins affinity purified with the enriched libraries. We also examined with plasma protein content before and after affinity pulldowns with the enriched libraries and found that exosomal proteins were depleted from plasma samples during the pulldowns. Taken together, the above experiments indicate that the enriched libraries recognize exosomal biomarkers in the plasma samples.

[1367] We next validated the binding of the enriched libraries by probing the corresponding patient plasma samples used for enrichment. For probing, the enriched libraries were incubated with various plasma samples, the samples were subjected to PEG purification, and aptamers that precipitated with the exosomal pellet were PCR amplified and sequenced by NGS. FIG. 23C shows an example of PCR of a library enriched against a ER+/HER2− after incubation and recovery of aptamers with the following samples: 1) the ER+/HER2− cancer sample used for enrichment (three lanes labeled “Cancer”); 2) two healthy controls (three lanes labeled “Normal 1” and three lanes labeled “Normal 2”); and 3) two biopsy confirmed negative samples (three lanes labeled “Non-C1” and three lanes labeled “Non-C2”). In these samples, the preferential binding of the enriched library to the cancer samples can be observed visually in the gel. Similar analysis was performed for each of the 12 enriched libraries and amount of PCR-amplified aptamers was quantified by QuBit quantitation assays (ThermoFisher Scientific). Results are shown in FIG. 23D. For each library (1-12) the bars in the graph are, left to right, the cancer sample, two healthy controls, and two biopsy confirmed non-cancers. As shown in the graph, for most libraries the preferential binding to the cancer sample is observed simply by quantitation of the bound aptamer library. We also sequenced the enriched libraries after PCR using NGS. FIG. 23E shows raw data for observed sequences after volume normalized input per flow cells. In the figure, plots of counts of individual sequences that precipitated with the indicated samples are shown. In the ductal ER+/HER2− sample (“ER+/HER2− D”), almost all sequences were associated with the cancer sample compared to the controls (here, both controls and non-cancer). This corresponds to the visual results seen in FIG. 23C. With the lobular ER+/HER2− sample (“ER+/HER2− L”) and TNBC sample, it appeared that there were two populations of sequences, those preferentially binding the cancer samples and some preferentially binding the controls. With the HER2+sample, binding appeared to depend on the control sample, as greater binding was observed with the cancer sample over Control 1 or Non-Cancer 2, whereas non-preferential binding was dominate comparing the HER2+cancer sample to Control 2 or Non-Cancer 1. Thus for some sample, simple quantification of bound aptamer could differentiate cancer and controls, whereas for others NGS and corresponding analysis of individual aptamers may be required to differentiate cancer and controls.

[1368] Similar experiments to the above were performed using the enriched libraries to probe unrelated cancer samples. For probing, enriched libraries were incubated with various plasma samples, the samples were subjected to PEG purification, and aptamers that precipitated with the exosomal pellet were PCR amplified and sequenced by NGS. FIG. 23F shows a post-enrichment test of library “C-R12,” which was enriched on ER+/Her2− lobular breast cancer carcinoma case “C1” for 12 rounds. The upper plots show results using this library to probe the C1 enrichment sample versus a panel of control samples (both biopsy confirmed non-cancer and healthy (“N”)). We found bifurcated profile where some sequences preferentially associated with cancer whereas others appeared to preferentially associate with controls. The lower plots show the same using the C1-R12 library to probe unrelated cancer case “C2.” These results showed uniform distribution of sequences with the library preferentially binding C2 in certain cases (e.g., second plot from left “Non-C”) but preferentially binding certain control cases (e.g., third plot from left “Non-C”).

[1369] Additional enrichment was performed. The C1-R12 library was recovered from case C2 above and served as round 13 of enrichment on unrelated cases, to create the “C-R13” library. Post-enrichment testing of library C1-R13 using the set up as in FIG. 23F. These experiments showed that profiles of the cases C1 and C2 became more similar and more informative sequences were observed. See FIG. 23G, showing sequences that preferentially bind both C1 and C2 over the controls. Thus, certain sequences selected for C2 have specificity for C1 as well. This suggests that additional enrichment on unrelated cases expanded library specificity to detect cases unrelated to the enrichment process.

[1370] We validated the C1-R13 across a broader spectrum of unrelated samples. We used this library to probe unrelated cases including 10 ER+/Her2− lobular and 4 ductal (D) breast carcinoma, 2 triple negative breast cancer (TNBC), 11 breast cancer biopsy negative donors, and 10 healthy donors. The recovered aptamers were sequenced and used as biomarkers to differentiate the samples. The variable regions of the top 10,000 sequences are shown in SEQ ID NOs 4151-14150. Based on T test p values <0.0005, and fold change >1.5, 41 aptamers were selected to build a model to classify the lobular carcinoma samples. The variable regions of the sequences are shown in Table 44. FIG. 23H shows a bar chart of the detected levels (median of normalized counts) of these sequences in the various cancer and control samples. The bar chart shows that the group of lobular cases can be differentiated from other cancer types as well as from controls using the normalized counts of the chosen aptamers. The one misclassified lobular sample (i.e., Lobular 1 in FIG. 23H) was found to be progesterone negative (PR−) whereas all other lobular samples were PR+. Without being bound by theory, the different hormone receptor profile may account for the difference in this one sample. In addition, the one misclassified ductal sample (i.e., Ductal 4 in FIG. 23H) was micropapillary carcinoma, whereas all others are regular ductal carcinoma. Without being bound by theory, the different subtype may account for the difference in this one sample. Further in FIG. 23H, the Lobular 11 case is the enrichment case in rounds 1-12 and Lobular 8 is the case used for further enrichment in round 13. See details above.

TABLE 44
Variable Region Sequences 5′->3′

| | SEQ ID |
|---|---|
| SEQUENCE | NO. |
| AACCTGACCCCGCTTGTGACCCCGATCGGAGACTCA | 4429 |
| AATTGGCCACTGACCCCGGCGTAGATTGGGCTACA | 14151 |
| ACACTGACCCTGAGATGACGCTAACAGAACCCCGCA | 7405 |
| ACAGCCCCAGCTGTAGGAGGAGGCCCCAGCCGCAC | 4660 |
| ACATGCGGATGTCCCTAAGCTCTATGGGATTACCG | 9716 |
| ACCCCGACCGTATCATGACCCCGAAACTGCTAGTAGA | 4535 |
| ACGCAAGGCCTAACACTGACCCCGATGTAAGTTCCGA | 9526 |
| ACGTGCCCTACGTGTCCCAACGCGTGGTGGCTGAAGA | 11465 |
| ACTGACCCCGCATCCTTGACAGTTGATACTGGGGAA | 6078 |
| AGGACGAGGATCAGGGTCGCATAAGTTTGTAGCAGGA | 4267 |
| ATCCCAGCGCAAAAACTGTCTGTCGTCCCAACGATGA | 10371 |
| ATGCGCTGGAGAGGAACTTCGGGAAGTCGCGGTAGGA | 6448 |
| GAACATGCCAAAGCGCAATCCTGGTGCTGCCAGCATGA | 8881 |
| GACAAAACGTCCAGCACACTGACCCCGCCAGTTTA | 11426 |
| GCAGACCACTGACCCCGAATCATAAAGCTGGATTTGA | 5154 |
| GCATAAGAGGCCAACTGACCCCGATAGACAGCCGCA | 4547 |
| GCATACGCCCCGGAGAATCCTGCGATGGGCGTTAC | 7522 |
| GCCCAGTCCCGTCGTCCCAACGACAAGCTTACGTAGA | 8369 |
| GCGCTGGTTCAGTAAAACTGTCATGACTGTCCCTA | 14152 |
| GGTGAGCAAGTAGCGCATGGCCGGTTTCGATTGC | 4379 |
| GTACACCGACCCCGCTAAACAAAGAGACTGTGCGCA | 5296 |
| GTCTACAAGCGTGAGTAGCTCCATGACAGTTGGCGA | 7902 |
| TACTGACCCCGACCACGGGCCTACTGACTACAGTGGA | 5134 |
| TACTGACCCCGATACATTACAGTCTGTCTTTGTGGA | 4276 |
| TACTGACCCCGGTGATGGATGTCATACTGGAACACGA | 8691 |
| TAGAGCAATGATGCGACTGACCCCGAATTCCTGCC | 14153 |
| TAGCAACGCTCCTCACTGACCCCGGACAGTTCATCGA | 4285 |
| TAGTCGGGGAACACGCAGATCTTACTGACCCCGGAGA | 8228 |
| TATCTACCCCGGCAATAACACATACAGACCCCGTG | 6611 |
| TCAGCAAGTTCACCCCGACACCAACCCCGTGAGCTA | 5285 |
| TCCAAGCGAACACGTTTGACCACTGACCCCGTTCTTGA | 6864 |
| TCTAGCGCCGCTACATCTACTGACCCCGACCAAGG | 7742 |
| TGACAACGCCATTTGCTCGAACTACCATCCCAATGGA | 5527 |
| TGACAGGTGACGTCCCAACGCCACTTCGGCACTCA | 14154 |
| TGCATCGCCTGACCCCGAACAGCTTGTTACCTACC | 14155 |
| TGCCCACAACCGGCTTGTCAGCACACCCAATGTTG | 11797 |
| TGCCCCCAGGCCGGAGGGCGTGTCAGTGGCTCAGT | 14156 |
| TGTGCCCCCAGGCATATACACAGGTTGCCCACTAA | 9971 |
| TGTGCGATCTATGTACTTATACTGACCCCGAGAGAGA | 10484 |
| TTAGCCCCAGGTAATCCCCAGACGGCCGAAGGTGGGA | 4219 |
| TTGCACGCACAGATAGTCTTCGCTATACTGTTGCGA | 4461 |

[1371] FIG. 23I shows results from unsupervised clustering of the levels the sequences where all cancers clustered together and all controls clustered together. FIG. 2J shows an ROC curve for all cancer cases (lobular+ductal) versus control cases (AUC=0.924). 497 sequences were chosen based on the criteria Wilcoxon ranksum test, KS test or Ttest pvalues <0.0005 and fold change >1.2. As observed in FIGS. 23H-J, cancer cases can be differentiated from controls using probing of plasma sample exosomes with library C1-R13.

[1372] In the Examples above, we demonstrated the feasibility of aptamer library enrichment directly on blood plasma pools and demonstrated possibility to distinguish breast cancer patients from healthy volunteers (AUC 0.74). However, the pooled sample approach may not be ideal in all cases. Without being bound by theory, non-hemolytic incompatibility of plasma samples may introduces a subset of protein complexes which do not exist in individual samples and can interfere with enrichment. In this Example, we found that exosomes can be PEG-precipitated from plasma with similar efficacy to ultracentrifugation (UC) using Western blot, TEM, DLS and mass spectrometry (MS). Specificity of enriched aptamer library binding exosomal proteins was shown using NGS, MS and flow cytometry. The enrichment approach in this Example allowed us to develop aptamer libraries on individual plasma samples of breast cancer patients. Out of 12 libraries, 9 were able to detect corresponding cases. See FIG. 23D. We tested one library after additional round of training on an unrelated case, C1-R13, which was successfully validated on naïve cases. See FIGS. 23H-J. Thus the approach in this Example can be used to develop a liquid biopsy based on blood samples of cancer patients.

[1373] This Example shows that serial enrichment on individual blood samples promoted evolution of aptamer libraries that can detect and classify PR+/ER+/HER2− patients. Using the aptamer library, we identified all independent PR+/ER+/HER2−. See FIG. 23H. The evolved library was also able to detect other breast cancer subtypes. See FIG. 23J. This technology is well suited for profiling complex systems and phenotypes because it is based on physical evolution at the population level, and not merely algorithm training.

### Example 36: Small Non-Coding RNA Profiling from Prostate Cancer Plasma by Deep Sequencing

[1374] Prostate cancer (PCa) is the most common non-skin cancer among American men. MicroRNAs (miRNAs) are critical post-transcriptional regulators and involved in prostate cancer tumorigenesis. In this Example, we present a PCa-specific expression profile of miRNAs from plasma to guide prostate cancer diagnosis and therapeutic treatment.

[1375] Experimental workflow is shown in FIG. 24A. Plasma was collected from 5 PCa patients and 5 normal men. Circulating RNA was extracted from 1) 200 μl plasma or 2) the pellets of anti-Ago2 immunoprecipitations (IPs) from 500 μl plasma using the miRNeasy Serum/Plasma kit (Qiagen), with addition of glycogen as a carrier 2401. The anti-Ago2 immunoprecipitations pull down only those small RNAs that are associated with Ago2 protein. Small RNA libraries were constructed using the NEBNext Multiplex Small RNA Prep Set for Illumina® (New England BioLabs) 2402. The cDNA library fragments were purified by Blue Pippin (Sage Science) for extraction of 140-160 bp size fraction containing small RNA inserts 2403. Equimolar amounts of cDNA library samples were pooled and were sequenced in a single flowcell on an Illumina HiSeq2500 with 50 cycle kit and rapid run model 2404. Data flow and analysis 2405 is shown in FIG. 24B.

[1376] FIG. 24B illustrates the small RNA sequencing data process flow. Adaptor was firstly removed from the raw reads, and the sequences were mapped to several small RNA databases by using bowtie 1 with 1 mismatch. The multiple aligned reads were weighted to the mapped small RNAs based on their unique mapped reads counts. We then calculated the RPM (reads per million) as indicator of the expression levels of the small RNA. As a quality check, we discarded the small RNAs whose averages of the raw reads counts in cancer and normal groups are smaller than 25 and focused on the mature microRNAs. The moderate t-test was applied to find the differently expressed (DE) microRNAs between normal and cancer group.

[1377] Composition of the observed small RNAs are shown in FIG. 24C. In the figure, the composition of small RNA is identified by the different bands, which are, from bottom to top for each column: Spike In control; RNA Contaminants; tRNA; tRNA Fragments; hairpin miRNAs; mature miRNAs; yRNAs, piRNAs. Two major small RNA classes identified from total plasma are miRNA (47.7%) and yRNA (35.0%). The percentage of miRNA increased to 85.3% by Ago2-IP method. miRNAs are indicated as the largest band in the Ago2 columns and very little yRNA was observed in these cases. The compositions of categories of small RNAs in cancer and normal samples were similar in both total plasma and Ago2 immunocipitations.

[1378] The top10 miRNAs (as measured by fold change between cancer and normal group) by total plasma and Ago-2 IP are shown in Tables 45 and 46, respectively. Both tables show that miR-1299 had the greatest observed difference between cancer and normal. FIG. 24D plots the raw reads of has-miR-1299 comparing the normal group to cancer group from total plasma and Ago-2 IP methods. Otherwise, there was minimal overlap in miRNAs between total plasma and Ago-2 IP. See FIG. 24E.

TABLE 45
Top miRs in Total plasma between PCa and normal

| Total Plasma | logFC | PValue | FDR |
|---|---|---|---|
| hsa-miR-1299 | −3.05 | 0.001 | 0.144 |
| hsa-miR-4433b-3p | −1.73 | 0.023 | 0.296 |
| hsa-miR-1228-5p | −1.67 | 0.012 | 0.217 |
| hsa-miR-326 | −1.50 | 0.038 | 0.345 |
| hsa-miR-7976 | −1.50 | 0.022 | 0.296 |
| hsa-miR-23a-5p | −1.49 | 0.015 | 0.247 |
| hsa-miR-130a-3p | 1.63 | 0.030 | 0.311 |
| hsa-miR-200a-3p | 1.80 | 0.011 | 0.208 |
| hsa-miR-126-5p | 1.80 | 0.003 | 0.160 |
| hsa-miR-15a-5p | 1.96 | 0.001 | 0.144 |

TABLE 46
Top miRs in Ago2 precipitations between PCa and normal

| IP by Ago-2 | logFC | PValue | FDR |
|---|---|---|---|
| hsa-miR-1299 | −2.59 | 0.008 | 0.199 |
| hsa-miR-140-5p | −1.25 | 0.015 | 0.260 |
| hsa-miR-139-3p | 1.25 | 0.036 | 0.363 |
| hsa-miR-5189-5p | 1.26 | 0.005 | 0.182 |
| hsa-miR-218-5p | 1.36 | 0.042 | 0.385 |
| hsa-miR-125a-3p | 1.36 | 0.006 | 0.198 |
| hsa-miR-184 | 1.47 | 0.003 | 0.126 |
| hsa-miR-92b-5p | 1.66 | 0.016 | 0.260 |
| hsa-miR-485-5p | 2.11 | 0.000 | 0.030 |
| hsa-miR-107 | 2.78 | 0.000 | 0.030 |

[1379] In this Example, we present a unique expression profile of miRNA detectable in the plasma from prostate cancer patients. Extracted RNA from the pellets of anti-Ago2 immunoprecipitations can enhance the detection of miRNA.

[1380] Although preferred embodiments of the present invention have been shown and described herein, it will be obvious to those skilled in the art that such embodiments are provided by way of example only. Numerous variations, changes, and substitutions will now occur to those skilled in the art without departing from the invention. It should be understood that various alternatives to the embodiments of the invention described herein may be employed in practicing the invention. It is intended that the following claims define the scope of the invention and that methods and structures within the scope of these claims and their equivalents be covered thereby.

The application's sequence listing, which the Patent Office published only in electronic form, follows.

SEQUENCE LISTING (14156 sequences)

SEQ ID NO: 1 - DNA, 32 bp, Artificial Sequence
  Synthetic oligonucleotide
ccccccgaatcacatgacttgggcgggggtcg

SEQ ID NO: 2 - DNA, 32 bp, Artificial Sequence
  Synthetic oligonucleotide
accggatagcggttggaggcgtgctccactcg

SEQ ID NO: 3 - DNA, 32 bp, Artificial Sequence
  Synthetic oligonucleotide
ccgcgcagatatacaacgtacctctgtgcgca

SEQ ID NO: 4 - DNA, 70 bp, Artificial Sequence
  Synthetic oligonucleotide
atccagagtgacgcagcagtcttttctgatggacacgtggtggtctagtatctggacacggtggcttagt

SEQ ID NO: 5 - RNA, 70 nt, Artificial Sequence
  Synthetic oligonucleotide
auccagagugacgcagcagucuuuucugauggacacgugguggucuaguaucacuaagccaccgugucca

SEQ ID NO: 6 - DNA, 32 bp, Artificial Sequence
  Synthetic oligonucleotide
ctgtgaggcgtactgcggtgagcctctcatta

SEQ ID NO: 7 - DNA, 26 bp, Artificial Sequence
  Synthetic oligonucleotide
caattgggcccgtccgtatggtgggt

SEQ ID NO: 8 - RNA, 80 nt, Artificial Sequence
  Synthetic oligonucleotide
  site 15..55: n = a, g, c, t/u, unknown or other
gggaggacgaugcggnnnnnnnnnnnnnnnnnnnnnnnnnnnnnnnnnnnnnnnncagacgacucgcugaggauccgaga

SEQ ID NO: 9 - RNA, 15 nt, Artificial Sequence
  Synthetic oligonucleotide
gggaggacgaugcgg

SEQ ID NO: 10 - RNA, 25 nt, Artificial Sequence
  Synthetic oligonucleotide
cagacgacucgcugaggauccgaga

SEQ ID NO: 11 - RNA, 40 nt, Artificial Sequence
  Synthetic oligonucleotide
cgcgucuuccccgcauugccgcaauugccauacauuaaua

SEQ ID NO: 12 - DNA, 40 bp, Artificial Sequence
  Synthetic oligonucleotide
cgcgtcttccccgcattgccgcaattgccatacattaata

SEQ ID NO: 13 - RNA, 40 nt, Artificial Sequence
  Synthetic oligonucleotide
guccggaacgccucgauccucgcauaauaugauacgucug

SEQ ID NO: 14 - DNA, 40 bp, Artificial Sequence
  Synthetic oligonucleotide
gtccggaacgcctcgatcctcgcataatatgatacgtctg

SEQ ID NO: 15 - RNA, 40 nt, Artificial Sequence
  Synthetic oligonucleotide
guccaugguacgccucgauuccgcccauacaugcauguaa

SEQ ID NO: 16 - DNA, 40 bp, Artificial Sequence
  Synthetic oligonucleotide
gtccatggtacgcctcgattccgcccatacatgcatgtaa

SEQ ID NO: 17 - RNA, 40 nt, Artificial Sequence
  Synthetic oligonucleotide
cacuauccguuuguccguccucuugugguauugcgcaugc

SEQ ID NO: 18 - DNA, 40 bp, Artificial Sequence
  Synthetic oligonucleotide
cactatccgtttgtccgtcctcttgtggtattgcgcatgc

SEQ ID NO: 19 - RNA, 40 nt, Artificial Sequence
  Synthetic oligonucleotide
ucuuccaucuggucgcgauacagaauacgauuaacauaaa

SEQ ID NO: 20 - DNA, 40 bp, Artificial Sequence
  Synthetic oligonucleotide
tcttccatctggtcgcgatacagaatacgattaacataaa

SEQ ID NO: 21 - RNA, 40 nt, Artificial Sequence
  Synthetic oligonucleotide
gaucacgcugcccuuuguuuaaggccuuuauacaaacgca

SEQ ID NO: 22 - DNA, 40 bp, Artificial Sequence
  Synthetic oligonucleotide
gatcacgctgccctttgtttaaggcctttatacaaacgca

SEQ ID NO: 23 - RNA, 40 nt, Artificial Sequence
  Synthetic oligonucleotide
uauucgccagucacaucaacuaugaugacgcuugacugga

SEQ ID NO: 24 - DNA, 40 bp, Artificial Sequence
  Synthetic oligonucleotide
tattcgccagtcacatcaactatgatgacgcttgactgga

SEQ ID NO: 25 - RNA, 40 nt, Artificial Sequence
  Synthetic oligonucleotide
uaccgccucaucaucggacacgacguguaucaguuggcug

SEQ ID NO: 26 - RNA, 40 nt, Artificial Sequence
  Synthetic oligonucleotide
guucucgccucuguccucaugguucgaaccgguaugcaug

SEQ ID NO: 27 - RNA, 40 nt, Artificial Sequence
  Synthetic oligonucleotide
gcgguuucuucuccugacuacaugagauuaauaaacgcgc

SEQ ID NO: 28 - RNA, 40 nt, Artificial Sequence
  Synthetic oligonucleotide
ccgccucgaacacugacgucguggaaccuucgauugcuag

SEQ ID NO: 29 - RNA, 40 nt, Artificial Sequence
  Synthetic oligonucleotide
aaucacaguaauucugccccucugaugaaaccgguuacuu

SEQ ID NO: 30 - RNA, 40 nt, Artificial Sequence
  Synthetic oligonucleotide
cuuagugauuucgccgccccucuguuuaguggccauugga

SEQ ID NO: 31 - RNA, 40 nt, Artificial Sequence
  Synthetic oligonucleotide
acacuauuccgguaagucaucguuuaaccguuuguugcaa

SEQ ID NO: 32 - RNA, 40 nt, Artificial Sequence
  Synthetic oligonucleotide
ugcgcaacgccuugauucacuccuacagugugucuauaga

SEQ ID NO: 33 - RNA, 40 nt, Artificial Sequence
  Synthetic oligonucleotide
aauguuaagcuuacauacgccugggucacucuuuguucug

SEQ ID NO: 34 - RNA, 40 nt, Artificial Sequence
  Synthetic oligonucleotide
guaaauauucacguugaaucgccuugcuccucuuagucug

SEQ ID NO: 35 - RNA, 40 nt, Artificial Sequence
  Synthetic oligonucleotide
ccgccucggaucguucccaauggugguaccccuauuaaug

SEQ ID NO: 36 - RNA, 40 nt, Artificial Sequence
  Synthetic oligonucleotide
uguagaucguucuuauccgccucggucuuccccagguuaa

SEQ ID NO: 37 - RNA, 40 nt, Artificial Sequence
  Synthetic oligonucleotide
aucgucgggccccuuuuaugaaacuuacaugaaagcgcac

SEQ ID NO: 38 - RNA, 40 nt, Artificial Sequence
  Synthetic oligonucleotide
uaagagugcacaguacugccucgauccuccauggcuuaag

SEQ ID NO: 39 - RNA, 40 nt, Artificial Sequence
  Synthetic oligonucleotide
gaauuaguacugacggccgccuugauccuccguuagucug

SEQ ID NO: 40 - RNA, 40 nt, Artificial Sequence
  Synthetic oligonucleotide
gcccgccuccgaagcccuccuaagugcacuuuaaaccgcg

SEQ ID NO: 41 - RNA, 40 nt, Artificial Sequence
  Synthetic oligonucleotide
ccgccugggaucacucucuacgcguauaaaugcucuguca

SEQ ID NO: 42 - RNA, 40 nt, Artificial Sequence
  Synthetic oligonucleotide
agucugacccuguuauggacuaccauaucagaaagguacu

SEQ ID NO: 43 - RNA, 40 nt, Artificial Sequence
  Synthetic oligonucleotide
ggugauccucccccccgccucgaagauuugugcacauauc

SEQ ID NO: 44 - RNA, 40 nt, Artificial Sequence
  Synthetic oligonucleotide
gcuaccaucgucuagugagucacccuuaguucaucaaggc

SEQ ID NO: 45 - DNA, 18 bp, Artificial Sequence
  Synthetic oligonucleotide
gctgtgtgactcctgcaa

SEQ ID NO: 46 - DNA, 19 bp, Artificial Sequence
  Synthetic oligonucleotide
gcagctgtatcttgtctcc

SEQ ID NO: 47 - DNA, 43 bp, Artificial Sequence
  Synthetic oligonucleotide
gtccgcttgggggtgggtatcgaaaattcgcgttctggggcgg

SEQ ID NO: 48 - DNA, 43 bp, Artificial Sequence
  Synthetic oligonucleotide
cttcgctcgtttcaatgttcagttctggtctttaggtctttag

SEQ ID NO: 49 - DNA, 43 bp, Artificial Sequence
  Synthetic oligonucleotide
taggaggataatatgtatccggtgcatcggcctgactttcccc

SEQ ID NO: 50 - DNA, 43 bp, Artificial Sequence
  Synthetic oligonucleotide
taggagggctgaaaacttgcttcttcccggtgcagttataaca

SEQ ID NO: 51 - DNA, 43 bp, Artificial Sequence
  Synthetic oligonucleotide
taggaggataatatgtatccgatgcatgggcccgactttcccc

SEQ ID NO: 52 - DNA, 43 bp, Artificial Sequence
  Synthetic oligonucleotide
tgcgttttccttggggttcagggtaggatgggggtggaggtgg

SEQ ID NO: 53 - DNA, 43 bp, Artificial Sequence
  Synthetic oligonucleotide
ggggggcgggtgggctggtaaaaggtgatgcgggggtattgtt

SEQ ID NO: 54 - DNA, 43 bp, Artificial Sequence
  Synthetic oligonucleotide
taggaggataatatgtatccggtgcatcggcccaactttcccc

SEQ ID NO: 55 - DNA, 43 bp, Artificial Sequence
  Synthetic oligonucleotide
ccaatctcggaaggtttaaataaggtggtctttaggtctttag

SEQ ID NO: 56 - DNA, 43 bp, Artificial Sequence
  Synthetic oligonucleotide
tacgttaagtgggtcgggaggggggaatagggggtttggttgg

SEQ ID NO: 57 - DNA, 43 bp, Artificial Sequence
  Synthetic oligonucleotide
gtgaggtcggtggggcgggggatggtggggggtcgtttacatt

SEQ ID NO: 58 - DNA, 42 bp, Artificial Sequence
  Synthetic oligonucleotide
cgatattgggggggggttggcgggctattttccgggtgggtg

SEQ ID NO: 59 - DNA, 43 bp, Artificial Sequence
  Synthetic oligonucleotide
tcggttcctgttaattcgctggtggttggtggggtggcggatg

SEQ ID NO: 60 - DNA, 42 bp, Artificial Sequence
  Synthetic oligonucleotide
gcggggaggtgggggtgggtggagggttggttactctctact

SEQ ID NO: 61 - DNA, 43 bp, Artificial Sequence
  Synthetic oligonucleotide
cgggaatgggagggtgggggtggtggccgggtcgtgttatacc

SEQ ID NO: 62 - DNA, 43 bp, Artificial Sequence
  Synthetic oligonucleotide
taggaggataatatgtatccggtgcatcggtccgactttcccc

SEQ ID NO: 63 - DNA, 43 bp, Artificial Sequence
  Synthetic oligonucleotide
tatagttgggcgtaggcgggggggggtggttgggaggtccaag

SEQ ID NO: 64 - DNA, 43 bp, Artificial Sequence
  Synthetic oligonucleotide
taggaggataatatgtatccggtgcatcggcccgaccttcccc

SEQ ID NO: 65 - DNA, 43 bp, Artificial Sequence
  Synthetic oligonucleotide
tcgatcgtcctcaggatctcgtggttcaaatcataaagattat

SEQ ID NO: 66 - DNA, 43 bp, Artificial Sequence
  Synthetic oligonucleotide
tgctgtctgggcgggggcggtcttgtggtttctttgggggggg

SEQ ID NO: 67 - DNA, 43 bp, Artificial Sequence
  Synthetic oligonucleotide
gcgagacaggagggtggtcttatacgtgggggggggtggttgg

SEQ ID NO: 68 - DNA, 43 bp, Artificial Sequence
  Synthetic oligonucleotide
taggagggctgaagacttgcttcttcccggtgcagttataaca

SEQ ID NO: 69 - DNA, 43 bp, Artificial Sequence
  Synthetic oligonucleotide
cgtgtggggggtgggttgggctcgggttgttatcagttccatg

SEQ ID NO: 70 - DNA, 43 bp, Artificial Sequence
  Synthetic oligonucleotide
cgatattggggggggggttggcgggctattttccgggtgggtg

SEQ ID NO: 71 - DNA, 43 bp, Artificial Sequence
  Synthetic oligonucleotide
taggaggataatatgtatccggtgcatcggcccgactttcctc

SEQ ID NO: 72 - DNA, 43 bp, Artificial Sequence
  Synthetic oligonucleotide
taggaggataatatgtatccggtgcatcggctcgactttcccc

SEQ ID NO: 73 - DNA, 43 bp, Artificial Sequence
  Synthetic oligonucleotide
cttcgctcgtttcaatgtttagttctggtctttaggtctttag

SEQ ID NO: 74 - DNA, 43 bp, Artificial Sequence
  Synthetic oligonucleotide
ggacatgggttgggtcgggagggggtggtcggttgggcagtaa

SEQ ID NO: 75 - DNA, 43 bp, Artificial Sequence
  Synthetic oligonucleotide
taggaggataatatgtatacgatgcatcggcccgactttcccc

SEQ ID NO: 76 - DNA, 43 bp, Artificial Sequence
  Synthetic oligonucleotide
taggaggataatatgtatcagatgcatcggcccgactttcccc

SEQ ID NO: 77 - DNA, 43 bp, Artificial Sequence
  Synthetic oligonucleotide
tggatgtatggggtctcggggtgggagggttcaacttatctgg

SEQ ID NO: 78 - DNA, 43 bp, Artificial Sequence; identical to SEQ ID NO: 47
  Synthetic oligonucleotide

SEQ ID NO: 79 - DNA, 43 bp, Artificial Sequence
  Synthetic oligonucleotide
tcttgtacaaataggagggaagggggttttgggaggtgggtgg

SEQ ID NO: 80 - DNA, 43 bp, Artificial Sequence; identical to SEQ ID NO: 48
  Synthetic oligonucleotide

SEQ ID NO: 81 - DNA, 43 bp, Artificial Sequence
  Synthetic oligonucleotide
ctgatgttagtaggtcggggtccggttgggggttgggttgagg

SEQ ID NO: 82 - DNA, 43 bp, Artificial Sequence
  Synthetic oligonucleotide
tggctcgtggacgtggtggtggcgggtcgtgggggtgggtagg

SEQ ID NO: 83 - DNA, 43 bp, Artificial Sequence
  Synthetic oligonucleotide
taggaggataatatgtatccgatgcatcggcacgactttcccc

SEQ ID NO: 84 - DNA, 43 bp, Artificial Sequence
  Synthetic oligonucleotide
cggggagggggggtcggggtatttattgtgtatgttttttgtg

SEQ ID NO: 85 - DNA, 43 bp, Artificial Sequence
  Synthetic oligonucleotide
tgactgtatcttggggcgggttctggggggggtgtattgttca

SEQ ID NO: 86 - DNA, 43 bp, Artificial Sequence
  Synthetic oligonucleotide
taggaggataatatgtatccgatgcatcggcccgactttcacc

SEQ ID NO: 87 - DNA, 43 bp, Artificial Sequence
  Synthetic oligonucleotide
tcatgtctaggggggggaagtcggtttgggtgggtactctgtg

SEQ ID NO: 88 - DNA, 43 bp, Artificial Sequence
  Synthetic oligonucleotide
cttgtttcgctttgggtttgggcgggtgggtcaattcctgttg

SEQ ID NO: 89 - DNA, 43 bp, Artificial Sequence
  Synthetic oligonucleotide
ggtgggggccctcggtactgtggcggggtgggtgggtttagtg

SEQ ID NO: 90 - DNA, 43 bp, Artificial Sequence; identical to SEQ ID NO: 52
  Synthetic oligonucleotide

SEQ ID NO: 91 - DNA, 43 bp, Artificial Sequence
  Synthetic oligonucleotide
tggtggggtgggtctgtggggtggttttgttcttatcggggtt

SEQ ID NO: 92 - DNA, 43 bp, Artificial Sequence
  Synthetic oligonucleotide
tgggtgggttacgggtgggtgttgttatcgcgctgatctggtt

SEQ ID NO: 93 - DNA, 43 bp, Artificial Sequence
  Synthetic oligonucleotide
cgtgacggttttaatcaggggggggactctaacatttgggtgg

SEQ ID NO: 94 - DNA, 43 bp, Artificial Sequence
  Synthetic oligonucleotide
tgctcatatcgtggggggatggggttgctagtggatggggtgg

SEQ ID NO: 95 - DNA, 43 bp, Artificial Sequence; identical to SEQ ID NO: 53
  Synthetic oligonucleotide

SEQ ID NO: 96 - DNA, 43 bp, Artificial Sequence
  Synthetic oligonucleotide
tgatgtggggggtggggtataatacttatgtttggggtttggg

SEQ ID NO: 97 - DNA, 43 bp, Artificial Sequence
  Synthetic oligonucleotide
ttgggtgggtgggaatgggtattttttcttcgggcgatgtttg

SEQ ID NO: 98 - DNA, 43 bp, Artificial Sequence
  Synthetic oligonucleotide
tagttggatactggatttgggagggatggggggaggagggtgg

SEQ ID NO: 99 - DNA, 42 bp, Artificial Sequence
  Synthetic oligonucleotide
ctggaaggttgggtgtggggcgggggggaggtctctctatgt

SEQ ID NO: 100 - DNA, 43 bp, Artificial Sequence; identical to SEQ ID NO: 56
  Synthetic oligonucleotide

SEQ ID NO: 101 - DNA, 43 bp, Artificial Sequence
  Synthetic oligonucleotide
tgccgtgggccggggagggtgggttggcgtctctgtttcgata

SEQ ID NO: 102 - DNA, 43 bp, Artificial Sequence
  Synthetic oligonucleotide
gggggggcggccggggtggactgtggcccgtcttcgtattgtt

SEQ ID NO: 103 - DNA, 42 bp, Artificial Sequence
  Synthetic oligonucleotide
tggtggtggctgggggacgggtatcctggaattaggggtggg

SEQ ID NO: 104 - DNA, 43 bp, Artificial Sequence
  Synthetic oligonucleotide
tcggttcatgttgggtgggatcggggcggggtttcttctcctg

SEQ ID NO: 105 - DNA, 43 bp, Artificial Sequence; identical to SEQ ID NO: 75
  Synthetic oligonucleotide

SEQ ID NO: 106 - DNA, 43 bp, Artificial Sequence
  Synthetic oligonucleotide
tcgtgggtgtgttctggggggcgtggacgggggttaatgggca

SEQ ID NO: 107 - DNA, 43 bp, Artificial Sequence
  Synthetic oligonucleotide
taggaggataatatgtatccgatgcatcggcccgactttcccc

SEQ ID NO: 108 - DNA, 43 bp, Artificial Sequence
  Synthetic oligonucleotide
taagagtcttaggatgacgtcattcgtccgtcacggtgcggga

SEQ ID NO: 109 - DNA, 43 bp, Artificial Sequence
  Synthetic oligonucleotide
gcctggccagatagcagttaccttacgggatctatattcaccg

SEQ ID NO: 110 - DNA, 43 bp, Artificial Sequence; identical to SEQ ID NO: 82
  Synthetic oligonucleotide

SEQ ID NO: 111 - DNA, 43 bp, Artificial Sequence
  Synthetic oligonucleotide
ttcgtgttcatctgtttattgttattcacaatccgtcttttgt

SEQ ID NO: 112 - DNA, 43 bp, Artificial Sequence
  Synthetic oligonucleotide
cgaatccgtcgaccgccctcgtaaccatccaacccagtctcct

SEQ ID NO: 113 - DNA, 43 bp, Artificial Sequence
  Synthetic oligonucleotide
caggaaagttacttatcttttagacggttatgttctcattact

SEQ ID NO: 114 - DNA, 43 bp, Artificial Sequence
  Synthetic oligonucleotide
atctgctcgatacgtagatagtctgctcgatacaaaagggtgg

SEQ ID NO: 115 - DNA, 43 bp, Artificial Sequence
  Synthetic oligonucleotide
cgatgagcgggctccgatattgtgtcggcgtgactaccttgat

SEQ ID NO: 116 - DNA, 43 bp, Artificial Sequence
  Synthetic oligonucleotide
ggtcggcctatttattgcggcacgttgtttcttgatgtcgccc

SEQ ID NO: 117 - DNA, 43 bp, Artificial Sequence
  Synthetic oligonucleotide
tcgaattcagttctacatgtgtatttcttgctccgtttcagaa

SEQ ID NO: 118 - DNA, 43 bp, Artificial Sequence
  Synthetic oligonucleotide
tcggtccggcaacaaaccccacgcgccttcgatatgcctgtcg

SEQ ID NO: 119 - DNA, 43 bp, Artificial Sequence; identical to SEQ ID NO: 55
  Synthetic oligonucleotide

SEQ ID NO: 120 - DNA, 43 bp, Artificial Sequence; identical to SEQ ID NO: 70
  Synthetic oligonucleotide

SEQ ID NO: 121 - DNA, 43 bp, Artificial Sequence; identical to SEQ ID NO: 61
  Synthetic oligonucleotide

SEQ ID NO: 122 - DNA, 43 bp, Artificial Sequence
  Synthetic oligonucleotide
cgtggtgggttcttgggtggggggggagggttggcgtagtata

SEQ ID NO: 123 - DNA, 43 bp, Artificial Sequence; identical to SEQ ID NO: 57
  Synthetic oligonucleotide

SEQ ID NO: 124 - DNA, 43 bp, Artificial Sequence; identical to SEQ ID NO: 56
  Synthetic oligonucleotide

SEQ ID NO: 125 - DNA, 43 bp, Artificial Sequence; identical to SEQ ID NO: 54
  Synthetic oligonucleotide

SEQ ID NO: 126 - DNA, 43 bp, Artificial Sequence; identical to SEQ ID NO: 50
  Synthetic oligonucleotide

SEQ ID NO: 127 - DNA, 43 bp, Artificial Sequence; identical to SEQ ID NO: 59
  Synthetic oligonucleotide

SEQ ID NO: 128 - DNA, 43 bp, Artificial Sequence; identical to SEQ ID NO: 66
  Synthetic oligonucleotide

SEQ ID NO: 129 - DNA, 43 bp, Artificial Sequence
  Synthetic oligonucleotide
aacatggggttctgataaacctgtgccaaatacattgttgagt

SEQ ID NO: 130 - DNA, 43 bp, Artificial Sequence
  Synthetic oligonucleotide
attcctcctttgtaagggatgatatccaactcctctgcgttcg

SEQ ID NO: 131 - DNA, 20 bp, Artificial Sequence
  Synthetic oligonucleotide
ctagcatgactgcagtacgt

SEQ ID NO: 132 - DNA, 33 bp, Artificial Sequence
  Synthetic oligonucleotide
ctgtctcttatacacatctgacgctgccgacga

SEQ ID NO: 133 - DNA, 15 bp, Artificial Sequence
  Synthetic oligonucleotide
tcgtcggcagcgtca

SEQ ID NO: 134 - protein, 8 aa, Artificial Sequence
  Synthetic peptide
DYKDDDDK

SEQ ID NO: 135 - protein, 9 aa, Artificial Sequence
  Synthetic peptide
YPYDVPDYA

SEQ ID NO: 136 - protein, 10 aa, Artificial Sequence
  Synthetic peptide
EQKLISEEDL

SEQ ID NO: 137 - DNA, 35 bp, Artificial Sequence
  Synthetic oligonucleotide
aacccgcgtgattggggtactgcccatgcgacttt

SEQ ID NO: 138 - DNA, 35 bp, Artificial Sequence
  Synthetic oligonucleotide
aactgaaggccaattaaactccactgtgctaatct

SEQ ID NO: 139 - DNA, 38 bp, Artificial Sequence
  Synthetic oligonucleotide
acatgccggcgttgatactctactgtgctccattatga

SEQ ID NO: 140 - DNA, 36 bp, Artificial Sequence
  Synthetic oligonucleotide
agacatgccacgccctttacatactccactgtgcca

SEQ ID NO: 141 - DNA, 34 bp, Artificial Sequence
  Synthetic oligonucleotide
agccacgcagacctatctctactgtgccaatgtt

SEQ ID NO: 142 - DNA, 37 bp, Artificial Sequence
  Synthetic oligonucleotide
aggtacgtaaggctgccattactctctactgtgccga

SEQ ID NO: 143 - DNA, 35 bp, Artificial Sequence
  Synthetic oligonucleotide
agtctagcgatcgacttttctctacggtgcccttc

SEQ ID NO: 144 - DNA, 37 bp, Artificial Sequence
  Synthetic oligonucleotide
agtgtgcgcatgaatccattactccactgtgccttga

SEQ ID NO: 145 - DNA, 37 bp, Artificial Sequence
  Synthetic oligonucleotide
agttgcagacccttgtattctctaccgtgccctatga

SEQ ID NO: 146 - DNA, 34 bp, Artificial Sequence
  Synthetic oligonucleotide
cactgctaactgatattgttgaactccaccgtgc

SEQ ID NO: 147 - DNA, 38 bp, Artificial Sequence
  Synthetic oligonucleotide
catgcgacaagcttccattaaccatccgctatttatga

SEQ ID NO: 148 - DNA, 36 bp, Artificial Sequence
  Synthetic oligonucleotide
catgcggaccacgctttcacaaactcatgattcaaa

SEQ ID NO: 149 - DNA, 35 bp, Artificial Sequence
  Synthetic oligonucleotide
catgcgtacgtcctattctctctactgtgcattaa

SEQ ID NO: 150 - DNA, 35 bp, Artificial Sequence
  Synthetic oligonucleotide
cctgcaatgcggaaacccttctactctactgtgcc

SEQ ID NO: 151 - DNA, 36 bp, Artificial Sequence
  Synthetic oligonucleotide
cgcgagccagggtactgcctgcggtctaaacaatca

SEQ ID NO: 152 - DNA, 36 bp, Artificial Sequence
  Synthetic oligonucleotide
cgtgcgacttgttctctactgtgccaataaaccata

SEQ ID NO: 153 - DNA, 35 bp, Artificial Sequence
  Synthetic oligonucleotide
gatagcgcatattcctctactgtgctacttgttat

SEQ ID NO: 154 - DNA, 36 bp, Artificial Sequence
  Synthetic oligonucleotide
gcaaaccaattagtgtacctctaccgtgcccaatga

SEQ ID NO: 155 - DNA, 38 bp, Artificial Sequence
  Synthetic oligonucleotide
gcaactactctctaccgtgcccagtgatttctccatga

SEQ ID NO: 156 - DNA, 36 bp, Artificial Sequence
  Synthetic oligonucleotide
gcaccacatgtcaatctctactgtgcttatctcata

SEQ ID NO: 157 - DNA, 36 bp, Artificial Sequence
  Synthetic oligonucleotide
gcagcacaaaagttactctcctctaccgtgccccta

SEQ ID NO: 158 - DNA, 36 bp, Artificial Sequence
  Synthetic oligonucleotide
gcagtttgcgtggatactctactgtgctgaccctta

SEQ ID NO: 159 - DNA, 36 bp, Artificial Sequence
  Synthetic oligonucleotide
gcatacatgaactctaccgtgcccgttgacttgaaa

SEQ ID NO: 160 - DNA, 35 bp, Artificial Sequence
  Synthetic oligonucleotide
gcatagcggttcacattattttactctaccgtgcc

SEQ ID NO: 161 - DNA, 34 bp, Artificial Sequence
  Synthetic oligonucleotide
gccacagtatcgttctcgagctggttcccgccat

SEQ ID NO: 162 - DNA, 38 bp, Artificial Sequence
  Synthetic oligonucleotide
gcgaacatcactctaccgtgccatctgaaatgacgtga

SEQ ID NO: 163 - DNA, 38 bp, Artificial Sequence
  Synthetic oligonucleotide
gcgaacttgtaactctactgtgcttatattaaggttga

SEQ ID NO: 164 - DNA, 35 bp, Artificial Sequence
  Synthetic oligonucleotide
gcgaccaatactctactgtgctgatacggatttta

SEQ ID NO: 165 - DNA, 35 bp, Artificial Sequence
  Synthetic oligonucleotide
gcgaccactctataacctcaaccgtgctcactcct

SEQ ID NO: 166 - DNA, 37 bp, Artificial Sequence
  Synthetic oligonucleotide
gcgcaagttgtctctaccgtgccccgaaagttttgga

SEQ ID NO: 167 - DNA, 35 bp, Artificial Sequence
  Synthetic oligonucleotide
gcgcaccacctacattgtctccaccgtgctttatt

SEQ ID NO: 168 - DNA, 36 bp, Artificial Sequence
  Synthetic oligonucleotide
gcgcacccacgtgaactctaccgtgcctatttccta

SEQ ID NO: 169 - DNA, 38 bp, Artificial Sequence
  Synthetic oligonucleotide
gcgcaccgacctctaccgtgccaaaataggttatctga

SEQ ID NO: 170 - DNA, 35 bp, Artificial Sequence
  Synthetic oligonucleotide
gcgccaccacacaaaccttccctatcgagggagat

SEQ ID NO: 171 - DNA, 37 bp, Artificial Sequence
  Synthetic oligonucleotide
gcgcggactatattactctactgtgccctgcttatga

SEQ ID NO: 172 - DNA, 35 bp, Artificial Sequence
  Synthetic oligonucleotide
gcggataggacaataacttactccactgtgccatc

SEQ ID NO: 173 - DNA, 35 bp, Artificial Sequence
  Synthetic oligonucleotide
gcggtgacctctactgtgcgccccaagccttagtt

SEQ ID NO: 174 - DNA, 38 bp, Artificial Sequence
  Synthetic oligonucleotide
gcgtacagaacctctaccgtgcccactcacttccatga

SEQ ID NO: 175 - DNA, 35 bp, Artificial Sequence
  Synthetic oligonucleotide
gcgtcccctcccggatggtcctttctctactgtgc

SEQ ID NO: 176 - DNA, 35 bp, Artificial Sequence
  Synthetic oligonucleotide
gcgtgctaacggtatgcaagacgtatgcgattttc

SEQ ID NO: 177 - DNA, 35 bp, Artificial Sequence
  Synthetic oligonucleotide
gctagaccgatccacctcaaacctctactgtgcct

SEQ ID NO: 178 - DNA, 35 bp, Artificial Sequence
  Synthetic oligonucleotide
gctagcttagctctaccgtgcacattccgctattt

SEQ ID NO: 179 - DNA, 35 bp, Artificial Sequence
  Synthetic oligonucleotide
ggtgcaggcaagatattttactctactgtgcattt

SEQ ID NO: 180 - DNA, 35 bp, Artificial Sequence
  Synthetic oligonucleotide
gtaaatgtacatgcgtatcctcacctctactgtgc

SEQ ID NO: 181 - DNA, 35 bp, Artificial Sequence
  Synthetic oligonucleotide
taacacgtctttcactctactgtgccctttatgcc

SEQ ID NO: 182 - DNA, 38 bp, Artificial Sequence
  Synthetic oligonucleotide
taatggcatgcggacctatcctctaccgtgctccttga

SEQ ID NO: 183 - DNA, 35 bp, Artificial Sequence
  Synthetic oligonucleotide
tatgcgatttctctaccgtgccaatatgccttgtt

SEQ ID NO: 184 - DNA, 36 bp, Artificial Sequence
  Synthetic oligonucleotide
tctgcgattctaccgttactctaccgtgccaccaaa

SEQ ID NO: 185 - DNA, 36 bp, Artificial Sequence
  Synthetic oligonucleotide
tgcgcagtcatttcgccatgttctctaccgtgccaa

SEQ ID NO: 186 - DNA, 38 bp, Artificial Sequence
  Synthetic oligonucleotide
tgtcaggcggtagtactctccaccgtgcctattgttga

SEQ ID NO: 187 - DNA, 35 bp, Artificial Sequence
  Synthetic oligonucleotide
acatgcataccctacgaatcgttccatcaccatac

SEQ ID NO: 188 - DNA, 35 bp, Artificial Sequence
  Synthetic oligonucleotide
agtcagtgcgcccgctatttacgatctcactgttc

SEQ ID NO: 189 - DNA, 35 bp, Artificial Sequence
  Synthetic oligonucleotide
agtgcagtcgcgatgggaacttcttctttgcttta

SEQ ID NO: 190 - DNA, 36 bp, Artificial Sequence
  Synthetic oligonucleotide
atggccatgcgaaccgaaacctagcccattttccta

SEQ ID NO: 191 - DNA, 34 bp, Artificial Sequence
  Synthetic oligonucleotide
attgcggtcatccccttccacgctataccaccat

SEQ ID NO: 192 - DNA, 35 bp, Artificial Sequence
  Synthetic oligonucleotide
cactgcaggtcactggcgccctatttcctcacatt

SEQ ID NO: 193 - DNA, 35 bp, Artificial Sequence
  Synthetic oligonucleotide
catgcccgtaaacgcctaatctaccaccttttgct

SEQ ID NO: 194 - DNA, 35 bp, Artificial Sequence
  Synthetic oligonucleotide
catgccgcctttcgacttccatatcccaacacgcc

SEQ ID NO: 195 - DNA, 35 bp, Artificial Sequence
  Synthetic oligonucleotide
catgccggtcattccatactcaaactcattcactc

SEQ ID NO: 196 - DNA, 35 bp, Artificial Sequence
  Synthetic oligonucleotide
catgcgagctacccttatcatctcatgtttgcttt

SEQ ID NO: 197 - DNA, 35 bp, Artificial Sequence
  Synthetic oligonucleotide
catgcgattgcgccccattccttgccttatctcac

SEQ ID NO: 198 - DNA, 36 bp, Artificial Sequence
  Synthetic oligonucleotide
catgcgcacatcgtactccgtagccctaaattatca

SEQ ID NO: 199 - DNA, 35 bp, Artificial Sequence
  Synthetic oligonucleotide
catgcgccctgtgcgttctctactaccctaatcat

SEQ ID NO: 200 - DNA, 38 bp, Artificial Sequence
  Synthetic oligonucleotide
catgtacgcacacccactgattctttaccacccactga

SEQ ID NO: 201 - DNA, 35 bp, Artificial Sequence
  Synthetic oligonucleotide
gcaggacaccccctcattatttgtttcatcctacg

SEQ ID NO: 202 - DNA, 35 bp, Artificial Sequence
  Synthetic oligonucleotide
gcatcaggcgcactttcatttgctaatcgtttttt

SEQ ID NO: 203 - DNA, 35 bp, Artificial Sequence
  Synthetic oligonucleotide
gccatgcgagagggttattgttgatctcatgggtt

SEQ ID NO: 204 - DNA, 35 bp, Artificial Sequence
  Synthetic oligonucleotide
gcgataaagcccatgtaaccctctgaaaacccgat

SEQ ID NO: 205 - DNA, 35 bp, Artificial Sequence
  Synthetic oligonucleotide
gcgccacgagctacccgacttccgattactttctt

SEQ ID NO: 206 - DNA, 35 bp, Artificial Sequence
  Synthetic oligonucleotide
gcggacatcgggcactttatacaaccacctttttg

SEQ ID NO: 207 - DNA, 36 bp, Artificial Sequence
  Synthetic oligonucleotide
gctgcaggccgtcccaaatattcgctcccacacata

SEQ ID NO: 208 - DNA, 35 bp, Artificial Sequence
  Synthetic oligonucleotide
gctggtcaggcgttccacacttcctacccgctttt

SEQ ID NO: 209 - DNA, 35 bp, Artificial Sequence
  Synthetic oligonucleotide
tatgcgcaggaccacctattacacgaccttatcct

SEQ ID NO: 210 - DNA, 35 bp, Artificial Sequence
  Synthetic oligonucleotide
tcaactggggtcagtgccaacgcttactttcttct

SEQ ID NO: 211 - DNA, 35 bp, Artificial Sequence
  Synthetic oligonucleotide
tcaagcagtcatagccggtttcacgctttacttac

SEQ ID NO: 212 - DNA, 35 bp, Artificial Sequence
  Synthetic oligonucleotide
aaaacacgcaaactacctggaaacttgacttcttt

SEQ ID NO: 213 - DNA, 35 bp, Artificial Sequence
  Synthetic oligonucleotide
aaaacactcacgatacctaccctggtcttcacaac

SEQ ID NO: 214 - DNA, 35 bp, Artificial Sequence
  Synthetic oligonucleotide
aaaacagcaggcattttcctgtactttcgaattca

SEQ ID NO: 215 - DNA, 35 bp, Artificial Sequence
  Synthetic oligonucleotide
aaaaccacagctaccattatcgcattggccctact

SEQ ID NO: 216 - DNA, 35 bp, Artificial Sequence
  Synthetic oligonucleotide
aaaacccaagcaccgaacgaactatccctttttct

SEQ ID NO: 217 - DNA, 35 bp, Artificial Sequence
  Synthetic oligonucleotide
aaaacccaccacgcgtcgtacgcataccacccttt

SEQ ID NO: 218 - DNA, 35 bp, Artificial Sequence
  Synthetic oligonucleotide
aaaaccggtcctgcgccttcttctccgcttttatt

SEQ ID NO: 219 - DNA, 35 bp, Artificial Sequence
  Synthetic oligonucleotide
caggtactgtggcaggcgatccattgctctctttt

SEQ ID NO: 220 - DNA, 35 bp, Artificial Sequence
  Synthetic oligonucleotide
caggtcagcagtccaggcgattactttctcttttc

SEQ ID NO: 221 - DNA, 35 bp, Artificial Sequence
  Synthetic oligonucleotide
cagtaaccgctgtctgtcatttttcaacattctgt

SEQ ID NO: 222 - DNA, 36 bp, Artificial Sequence
  Synthetic oligonucleotide
cagtaactgtagtcgtcgaaccttgcttacaaccca

SEQ ID NO: 223 - DNA, 35 bp, Artificial Sequence
  Synthetic oligonucleotide
cagtaaggaagctcatgcggtacaggtctacctcg

SEQ ID NO: 224 - DNA, 38 bp, Artificial Sequence
  Synthetic oligonucleotide
cagtaagtgctgtcactgcgccacttgtaaatacttga

SEQ ID NO: 225 - DNA, 36 bp, Artificial Sequence
  Synthetic oligonucleotide
cagtaatgcgaagctagtacgttctctcttatttta

SEQ ID NO: 226 - DNA, 35 bp, Artificial Sequence
  Synthetic oligonucleotide
cagtacaaacatcgcgattctttccttgatactgt

SEQ ID NO: 227 - DNA, 35 bp, Artificial Sequence
  Synthetic oligonucleotide
gagggcggctctaatgcatgcgctttcatctttgc

SEQ ID NO: 228 - DNA, 36 bp, Artificial Sequence
  Synthetic oligonucleotide
gagggcgggcagtcatttcgattatatctgcctaca

SEQ ID NO: 229 - DNA, 37 bp, Artificial Sequence
  Synthetic oligonucleotide
gagggcggtccaacgcgcaatgtcttttttcttccga

SEQ ID NO: 230 - DNA, 35 bp, Artificial Sequence
  Synthetic oligonucleotide
gagggcgtacaggagtcttgcggtccacattttat

SEQ ID NO: 231 - DNA, 35 bp, Artificial Sequence
  Synthetic oligonucleotide
gagggctactgaagttaatggcattcttctctatc

SEQ ID NO: 232 - DNA, 35 bp, Artificial Sequence
  Synthetic oligonucleotide
gagggctcatgccagccgcttttcttacctttatc

SEQ ID NO: 233 - DNA, 38 bp, Artificial Sequence
  Synthetic oligonucleotide
gagggctgaacaagtagtgcgtacattttccttcctga

SEQ ID NO: 234 - DNA, 35 bp, Artificial Sequence
  Synthetic oligonucleotide
gagggctgcaggcatccaatttcctccttgtccct

SEQ ID NO: 235 - DNA, 35 bp, Artificial Sequence
  Synthetic oligonucleotide
gaggggccgtccttcgtacggaatgtgcatgcgct

SEQ ID NO: 236 - DNA, 35 bp, Artificial Sequence
  Synthetic oligonucleotide
gaggggcggtcattgccgttagcctcctttcgcct

SEQ ID NO: 237 - DNA, 37 bp, Artificial Sequence
  Synthetic oligonucleotide
gcgaaactcgccatatacttaaacttgcccttttgga

SEQ ID NO: 238 - DNA, 38 bp, Artificial Sequence
  Synthetic oligonucleotide
aactgcacgtaaccttaatcactccaccgtgccattga

SEQ ID NO: 239 - DNA, 36 bp, Artificial Sequence
  Synthetic oligonucleotide
ttcgccgttaagcatcgtgtcatgcgcaactgttaa

SEQ ID NO: 240 - DNA, 35 bp, Artificial Sequence
  Synthetic oligonucleotide
acgcggacctagcatatcgtagtgcgtggcacttt

SEQ ID NO: 241 - DNA, 35 bp, Artificial Sequence
  Synthetic oligonucleotide
tatgcgcgccatcaccggaactaggtttgggcttt

SEQ ID NO: 242 - DNA, 35 bp, Artificial Sequence
  Synthetic oligonucleotide
gagtacggaatcgtgtcatcagctggatacttttt

SEQ ID NO: 243 - DNA, 38 bp, Artificial Sequence
  Synthetic oligonucleotide
atgcactgggctgaccggtattgcgtatttctctttga

SEQ ID NO: 244 - DNA, 35 bp, Artificial Sequence
  Synthetic oligonucleotide
tatgccccgttccattcttcattcactactagccc

SEQ ID NO: 245 - DNA, 36 bp, Artificial Sequence
  Synthetic oligonucleotide
aagcacaggtactagcaggttcgcactccctgacta

SEQ ID NO: 246 - DNA, 35 bp, Artificial Sequence
  Synthetic oligonucleotide
cacgccccaatatgccatactctactgtgcccctt

SEQ ID NO: 247 - DNA, 35 bp, Artificial Sequence
  Synthetic oligonucleotide
aatgcgcgctaaagaaggacttgtcttgccagccc

SEQ ID NO: 248 - DNA, 35 bp, Artificial Sequence
  Synthetic oligonucleotide
gaacggatcgtagtgaaacaggactggagcggccc

SEQ ID NO: 249 - DNA, 35 bp, Artificial Sequence
  Synthetic oligonucleotide
tcgtaggacaaaggcactggttgaatcttttctat

SEQ ID NO: 250 - DNA, 35 bp, Artificial Sequence
  Synthetic oligonucleotide
tgcgcgctaaacactgcaagtctagccccgcattc

SEQ ID NO: 251 - DNA, 35 bp, Artificial Sequence
  Synthetic oligonucleotide
tcacctaccaagtctccaatcattgcaccctctac

SEQ ID NO: 252 - DNA, 36 bp, Artificial Sequence
  Synthetic oligonucleotide
gcctatcaatgtctctctactgtgccggacttttta

SEQ ID NO: 253 - DNA, 36 bp, Artificial Sequence
  Synthetic oligonucleotide
aggactgcccccgcctgactctactgtgccatctca

SEQ ID NO: 254 - DNA, 35 bp, Artificial Sequence
  Synthetic oligonucleotide
ggtagctccaccgtgccatactcgatctttgttac

SEQ ID NO: 255 - DNA, 38 bp, Artificial Sequence
  Synthetic oligonucleotide
ttccgcgacctaactccaccgtgccataatccctttga

SEQ ID NO: 256 - DNA, 36 bp, Artificial Sequence
  Synthetic oligonucleotide
agacttaagcaaggtcgtacgtaggtagtcccacca

SEQ ID NO: 257 - DNA, 36 bp, Artificial Sequence
  Synthetic oligonucleotide
gctaactgcaggccccctatccgacctaaatataca

SEQ ID NO: 258 - DNA, 36 bp, Artificial Sequence
  Synthetic oligonucleotide
atcgtagtacgaatgtcaagcgtacacgctttccta

SEQ ID NO: 259 - DNA, 36 bp, Artificial Sequence
  Synthetic oligonucleotide
gcgttgatctctaccgtgcaccgaacactccccaca

SEQ ID NO: 260 - DNA, 38 bp, Artificial Sequence
  Synthetic oligonucleotide
gccgctatatcaatcctctactgtgcgaattaacctga

SEQ ID NO: 261 - DNA, 35 bp, Artificial Sequence
  Synthetic oligonucleotide
ttgctgttatcgtcctctactgtgccggtattcct

SEQ ID NO: 262 - DNA, 35 bp, Artificial Sequence
  Synthetic oligonucleotide
gtcatgcggaagctttcctgttttggtataatgtc

SEQ ID NO: 263 - DNA, 36 bp, Artificial Sequence
  Synthetic oligonucleotide
gcgaacagatttctctacggtgcttacacatattta

SEQ ID NO: 264 - DNA, 36 bp, Artificial Sequence
  Synthetic oligonucleotide
actggaaggagtcctacctgcctgacgcgtgacgta

SEQ ID NO: 265 - DNA, 38 bp, Artificial Sequence
  Synthetic oligonucleotide
gccaatactccactgtgcttgattttacttttgaatga

SEQ ID NO: 266 - DNA, 35 bp, Artificial Sequence
  Synthetic oligonucleotide
tgacctactaagtcagcgcacatcctgggctttct

SEQ ID NO: 267 - DNA, 35 bp, Artificial Sequence
  Synthetic oligonucleotide
tgtctctactgtgcccaattgttcggaaataactt

SEQ ID NO: 268 - DNA, 35 bp, Artificial Sequence
  Synthetic oligonucleotide
aacctctgctgtgcgttaaactctaccgtgcctac

SEQ ID NO: 269 - DNA, 36 bp, Artificial Sequence
  Synthetic oligonucleotide
tacaacgcgtgcttggggtgacgtggtgcctcttta

SEQ ID NO: 270 - DNA, 36 bp, Artificial Sequence
  Synthetic oligonucleotide
tagtcttgccgtctatctctaccgtgcctggcccta

SEQ ID NO: 271 - DNA, 35 bp, Artificial Sequence
  Synthetic oligonucleotide
gcggaactcgcccccttacatcattttttttggtt

SEQ ID NO: 272 - DNA, 35 bp, Artificial Sequence
  Synthetic oligonucleotide
tgcgtgctaaacggtctagcacatgcgggcctcac

SEQ ID NO: 273 - DNA, 38 bp, Artificial Sequence
  Synthetic oligonucleotide
gctgcagtgcgactctggcctccactgtgctaccttga

SEQ ID NO: 274 - DNA, 35 bp, Artificial Sequence
  Synthetic oligonucleotide
ggccacgactggttccccaattcacaggtatacat

SEQ ID NO: 275 - DNA, 35 bp, Artificial Sequence
  Synthetic oligonucleotide
gcgatagccttaacttgccttctgtgaactcgcct

SEQ ID NO: 276 - DNA, 35 bp, Artificial Sequence
  Synthetic oligonucleotide
tcacctactaggtccatccaatacttattgtccca

SEQ ID NO: 277 - DNA, 35 bp, Artificial Sequence
  Synthetic oligonucleotide
catgcggcaagcttttaactcagctttatctcata

SEQ ID NO: 278 - DNA, 38 bp, Artificial Sequence
  Synthetic oligonucleotide
catgacattttctccactgtgcttgtaattagtattga

SEQ ID NO: 279 - DNA, 36 bp, Artificial Sequence
  Synthetic oligonucleotide
aactccaccgtgcccacttcttgtttcatagtttaa

SEQ ID NO: 280 - DNA, 38 bp, Artificial Sequence
  Synthetic oligonucleotide
ccatgcgattttgtttcccctctactgtgcttatctga

SEQ ID NO: 281 - DNA, 35 bp, Artificial Sequence
  Synthetic oligonucleotide
tgttcacctgtccttcctctctactgtgccgttct

SEQ ID NO: 282 - DNA, 35 bp, Artificial Sequence
  Synthetic oligonucleotide
atgcgcgcgatcgaggtccccgatggcttcgctcc

SEQ ID NO: 283 - DNA, 36 bp, Artificial Sequence
  Synthetic oligonucleotide
tccgcgtgtaaccttggcatgtacctagtgtccaca

SEQ ID NO: 284 - DNA, 36 bp, Artificial Sequence
  Synthetic oligonucleotide
catgccaagctttcatttaggatttcgcccacatca

SEQ ID NO: 285 - DNA, 37 bp, Artificial Sequence
  Synthetic oligonucleotide
gcgtctgcgtcctagttttctctaccgtgcttttcga

SEQ ID NO: 286 - DNA, 36 bp, Artificial Sequence
  Synthetic oligonucleotide
ggctgctagacctccaccgtgccctttctttggtta

SEQ ID NO: 287 - DNA, 35 bp, Artificial Sequence
  Synthetic oligonucleotide
gagtcaggcccaggcttacatatcactagctttta

SEQ ID NO: 288 - DNA, 36 bp, Artificial Sequence
  Synthetic oligonucleotide
aatactctactgtgccccccgttttctcatcgatca

SEQ ID NO: 289 - DNA, 35 bp, Artificial Sequence
  Synthetic oligonucleotide
aggcatgcgcagagttaatttttttctctactgtg

SEQ ID NO: 290 - DNA, 36 bp, Artificial Sequence
  Synthetic oligonucleotide
gacctgcagcgcacgcccgatatctctactgtgcca

SEQ ID NO: 291 - DNA, 36 bp, Artificial Sequence
  Synthetic oligonucleotide
ccggggctaggaaagctaccacgtcatgcggaacta

SEQ ID NO: 292 - DNA, 35 bp, Artificial Sequence
  Synthetic oligonucleotide
catctcaaaactttcctctaccgtgcaaacattta

SEQ ID NO: 293 - DNA, 35 bp, Artificial Sequence
  Synthetic oligonucleotide
gcgatcgaacttgcctcctacaatcatcaactagc

SEQ ID NO: 294 - DNA, 38 bp, Artificial Sequence
  Synthetic oligonucleotide
cagtcatcccgtggactctgtgctcgtatctccattga

SEQ ID NO: 295 - DNA, 36 bp, Artificial Sequence
  Synthetic oligonucleotide
tcgtagtacgcggtgaaccctcaatttacgccccta

SEQ ID NO: 296 - DNA, 37 bp, Artificial Sequence
  Synthetic oligonucleotide
gcgtcgtccaactccactgtgcccattttaggtctga

SEQ ID NO: 297 - DNA, 35 bp, Artificial Sequence
  Synthetic oligonucleotide
gcatatgcggtgtttctactctaccgtgcaaaacc

SEQ ID NO: 298 - DNA, 36 bp, Artificial Sequence
  Synthetic oligonucleotide
gcggcaacacttcctctactgtgcttcctggcttaa

SEQ ID NO: 299 - DNA, 35 bp, Artificial Sequence
  Synthetic oligonucleotide
gattcggtccccttcttctctactgtgccttttct

SEQ ID NO: 300 - DNA, 35 bp, Artificial Sequence
  Synthetic oligonucleotide
ccgcgtgcttggtgcgtgctgcaggaaattggaaa

SEQ ID NO: 301 - DNA, 36 bp, Artificial Sequence
  Synthetic oligonucleotide
gcgtgccaacggactggagctctattgattgttcta

SEQ ID NO: 302 - DNA, 35 bp, Artificial Sequence
  Synthetic oligonucleotide
atgtacgtgcgtaccttttatattctctactgtgc

SEQ ID NO: 303 - DNA, 36 bp, Artificial Sequence
  Synthetic oligonucleotide
agagcctgggcttgctagctggatttggtcacgaaa

SEQ ID NO: 304 - DNA, 35 bp, Artificial Sequence
  Synthetic oligonucleotide
tactgcgcgcctggacccgtgtgctagacatgcgc

SEQ ID NO: 305 - DNA, 36 bp, Artificial Sequence
  Synthetic oligonucleotide
ccgtggtgccctgcgcgctaagaggctcacggagta

SEQ ID NO: 306 - DNA, 35 bp, Artificial Sequence
  Synthetic oligonucleotide
gtaccggacctagggactaacgtactggcacctct

SEQ ID NO: 307 - DNA, 36 bp, Artificial Sequence
  Synthetic oligonucleotide
taccgcgagcttgggaagtgctgctacgtctgccga

SEQ ID NO: 308 - DNA, 35 bp, Artificial Sequence
  Synthetic oligonucleotide
ggtatgcccgcttttactctactgtgcccgacata

SEQ ID NO: 309 - DNA, 36 bp, Artificial Sequence
  Synthetic oligonucleotide
gtgcaacactaagttgaccggattgagtctagcgaa

SEQ ID NO: 310 - DNA, 35 bp, Artificial Sequence
  Synthetic oligonucleotide
gactgcagggtgtcacctctaccgtgccatgaggt

SEQ ID NO: 311 - DNA, 35 bp, Artificial Sequence
  Synthetic oligonucleotide
ttcgtagtaccaatagtcagtaatgccctttcgcc

SEQ ID NO: 312 - DNA, 38 bp, Artificial Sequence
  Synthetic oligonucleotide
atgcactgtatgcgggctatgcgaatacctagttatga

SEQ ID NO: 313 - DNA, 36 bp, Artificial Sequence
  Synthetic oligonucleotide
cccggcgcgctacgggacgattatgagctcttgcaa

SEQ ID NO: 314 - DNA, 35 bp, Artificial Sequence
  Synthetic oligonucleotide
catgcgcacaggctttttaatctccatgaagtttc

SEQ ID NO: 315 - DNA, 38 bp, Artificial Sequence
  Synthetic oligonucleotide
gcgggcttacacgtactggaggggttgcatgccattga

SEQ ID NO: 316 - DNA, 35 bp, Artificial Sequence
  Synthetic oligonucleotide
gtcgtagtactcgcggtcaagagattccttatttc

SEQ ID NO: 317 - DNA, 35 bp, Artificial Sequence
  Synthetic oligonucleotide
cacgcgtgcttggcgacgttcacttgcgggcctat

SEQ ID NO: 318 - DNA, 36 bp, Artificial Sequence
  Synthetic oligonucleotide
gccacctcactccactgtgctatcttatcgccttca

SEQ ID NO: 319 - DNA, 36 bp, Artificial Sequence
  Synthetic oligonucleotide
cgtgtcctttgaccgtactgcgaaacgcctaccaaa

SEQ ID NO: 320 - DNA, 35 bp, Artificial Sequence
  Synthetic oligonucleotide
gaatcgtaacaaactgcaggcctatctctacttgt

SEQ ID NO: 321 - DNA, 37 bp, Artificial Sequence
  Synthetic oligonucleotide
gcaggaaacctctactgtgccttgtagtatactttga

SEQ ID NO: 322 - DNA, 38 bp, Artificial Sequence
  Synthetic oligonucleotide
gcagtccatagcgctcctggtctcctcttttgctttga

SEQ ID NO: 323 - DNA, 35 bp, Artificial Sequence
  Synthetic oligonucleotide
cgtgccactcaaatcctcctctaccgtgctttttt

SEQ ID NO: 324 - DNA, 35 bp, Artificial Sequence
  Synthetic oligonucleotide
tggagcacgccgccaatggacagtccaccttacct

SEQ ID NO: 325 - DNA, 35 bp, Artificial Sequence
  Synthetic oligonucleotide
gatgggcctgcgtgctaaggcgcgataacgggtgt

SEQ ID NO: 326 - DNA, 35 bp, Artificial Sequence
  Synthetic oligonucleotide
cgcgggccaggtctgcatgcatgcgaggtcacacc

SEQ ID NO: 327 - DNA, 37 bp, Artificial Sequence
  Synthetic oligonucleotide
gcgtgcttacgaacaaggtgcgtgcccgattctccga

SEQ ID NO: 328 - DNA, 36 bp, Artificial Sequence
  Synthetic oligonucleotide
tcagcggacctagcgaacgattgcggccaccactta

SEQ ID NO: 329 - DNA, 38 bp, Artificial Sequence
  Synthetic oligonucleotide
gccgcgcgtgccagcataatcgtactatgtctgcgtga

SEQ ID NO: 330 - DNA, 35 bp, Artificial Sequence
  Synthetic oligonucleotide
atcgtagaactagctagtctgcaatttctggttac

SEQ ID NO: 331 - DNA, 35 bp, Artificial Sequence
  Synthetic oligonucleotide
gccgcgtgcctggccaaactgggtcaacttttctc

SEQ ID NO: 332 - DNA, 38 bp, Artificial Sequence
  Synthetic oligonucleotide
tctatcgcgtgccagtgtacgtacggtgtcttatttga

SEQ ID NO: 333 - DNA, 35 bp, Artificial Sequence
  Synthetic oligonucleotide
ttacgttcccggactctactgtgcccctccctata

SEQ ID NO: 334 - DNA, 35 bp, Artificial Sequence
  Synthetic oligonucleotide
ccaaccgcgcgcctggggactacgtgacatctagc

SEQ ID NO: 335 - DNA, 36 bp, Artificial Sequence
  Synthetic oligonucleotide
tcgtagtactgctgctttgtgcgtccatactcgtta

SEQ ID NO: 336 - DNA, 37 bp, Artificial Sequence
  Synthetic oligonucleotide
atcgtagtactgcaactgggattattcacacactaga

SEQ ID NO: 337 - DNA, 36 bp, Artificial Sequence
  Synthetic oligonucleotide
gaattccgcgcgtagtcgagtactagggaaatcgaa

SEQ ID NO: 338 - DNA, 35 bp, Artificial Sequence
  Synthetic oligonucleotide
catgcggaccatgatttttattgagtttttgcttt

SEQ ID NO: 339 - DNA, 35 bp, Artificial Sequence
  Synthetic oligonucleotide
attcgagcggtcttgcgggtatccctccactgtgc

SEQ ID NO: 340 - DNA, 36 bp, Artificial Sequence
  Synthetic oligonucleotide
catgcgcattactctggtcaacttgccgaatcgaaa

SEQ ID NO: 341 - DNA, 37 bp, Artificial Sequence
  Synthetic oligonucleotide
gggcgtatcgtagccacgtacaagggttgcatattga

SEQ ID NO: 342 - DNA, 36 bp, Artificial Sequence
  Synthetic oligonucleotide
gcgagaagctttcaatcctcaaccttacgctttata

SEQ ID NO: 343 - DNA, 35 bp, Artificial Sequence
  Synthetic oligonucleotide
acgcctaagttgcctctaccgtgccgagccctcca

SEQ ID NO: 344 - DNA, 35 bp, Artificial Sequence
  Synthetic oligonucleotide
tgcggagctagcaacgagggtagagtgcgaattcc

SEQ ID NO: 345 - DNA, 35 bp, Artificial Sequence
  Synthetic oligonucleotide
gataagtcacggacggtttctctactgtgcctttt

SEQ ID NO: 346 - DNA, 36 bp, Artificial Sequence
  Synthetic oligonucleotide
gcgtgccaacaacctgcggacaaaagaccccctaaa

SEQ ID NO: 347 - DNA, 38 bp, Artificial Sequence
  Synthetic oligonucleotide
ggtcatgccgctaggggcgaactcctctgagcctgtga

SEQ ID NO: 348 - DNA, 38 bp, Artificial Sequence
  Synthetic oligonucleotide
cctcgcgcgccagggacgttgcaagttaaaccatatga

SEQ ID NO: 349 - DNA, 35 bp, Artificial Sequence
  Synthetic oligonucleotide
gcaggcgggccaggcttaatacacgcttctactta

SEQ ID NO: 350 - DNA, 34 bp, Artificial Sequence
  Synthetic oligonucleotide
atcgtagtaatgcagcaattgcaatactcctatt

SEQ ID NO: 351 - DNA, 36 bp, Artificial Sequence
  Synthetic oligonucleotide
accgaacctagggacgccccaggaatcacaatgtta

SEQ ID NO: 352 - DNA, 35 bp, Artificial Sequence
  Synthetic oligonucleotide
tactgctaactttcactctaccgtgcaaaccacca

SEQ ID NO: 353 - DNA, 35 bp, Artificial Sequence
  Synthetic oligonucleotide
cccggaagtgggttcgagctgcatcgtgtcaggcc

SEQ ID NO: 354 - DNA, 36 bp, Artificial Sequence
  Synthetic oligonucleotide
tagtaacttcatgcccccagtggaactcctctgaca

SEQ ID NO: 355 - DNA, 35 bp, Artificial Sequence
  Synthetic oligonucleotide
gtccacgcgtgcctgaggacacagccaggaaactt

SEQ ID NO: 356 - DNA, 36 bp, Artificial Sequence
  Synthetic oligonucleotide
aatcgctggccagaaagttagcagtcgaggcccaaa

SEQ ID NO: 357 - DNA, 36 bp, Artificial Sequence
  Synthetic oligonucleotide
agggcgtgccacctcgaacacgcaggtaatttttca

SEQ ID NO: 358 - DNA, 35 bp, Artificial Sequence
  Synthetic oligonucleotide
tcacctaccatgtccgagtaacactcgcccctcca

SEQ ID NO: 359 - DNA, 35 bp, Artificial Sequence
  Synthetic oligonucleotide
cgtggccggtggtccgtactgccaaaatatttaca

SEQ ID NO: 360 - DNA, 35 bp, Artificial Sequence
  Synthetic oligonucleotide
cgcgtgccagcggactttcaccatgcgatacgtgg

SEQ ID NO: 361 - DNA, 36 bp, Artificial Sequence
  Synthetic oligonucleotide
gagttaaagctatctctaccgtgccccctaaagtta

SEQ ID NO: 362 - DNA, 36 bp, Artificial Sequence
  Synthetic oligonucleotide
tatcgcgcgccagaagagtaagcaagtcatgaccca

SEQ ID NO: 363 - DNA, 37 bp, Artificial Sequence
  Synthetic oligonucleotide
tgaccaagggttccgctgtggggatacggttaaggga

SEQ ID NO: 364 - DNA, 36 bp, Artificial Sequence
  Synthetic oligonucleotide
agccggagctaggctagtgcgcaccagtcaaaccta

SEQ ID NO: 365 - DNA, 38 bp, Artificial Sequence
  Synthetic oligonucleotide
tcgtagtattgcaagggcaccttactcccaccatttga

SEQ ID NO: 366 - DNA, 35 bp, Artificial Sequence
  Synthetic oligonucleotide
gcgcagcttatcgccatccgcaaatccacacgctt

SEQ ID NO: 367 - DNA, 37 bp, Artificial Sequence
  Synthetic oligonucleotide
cccacgcgtgcctgtggatggcgcactcgggcataga

SEQ ID NO: 368 - DNA, 36 bp, Artificial Sequence
  Synthetic oligonucleotide
caaggagcacgtatgcactgtgcgagttggtccgta

SEQ ID NO: 369 - DNA, 36 bp, Artificial Sequence
  Synthetic oligonucleotide
agttagtctctaccgtgcccattattccgttctgaa

SEQ ID NO: 370 - DNA, 35 bp, Artificial Sequence
  Synthetic oligonucleotide
gcctgtgaaccttaaactctaccgtgcctctttgt

SEQ ID NO: 371 - DNA, 36 bp, Artificial Sequence
  Synthetic oligonucleotide
gctaaccaagtcatgggaccacgctctattgggata

SEQ ID NO: 372 - DNA, 35 bp, Artificial Sequence
  Synthetic oligonucleotide
gcaggcattattagtgtctctaccgtgctctggac

SEQ ID NO: 373 - DNA, 38 bp, Artificial Sequence
  Synthetic oligonucleotide
taccgcgcgcctggtagttgcagtattcctttgtttga

SEQ ID NO: 374 - DNA, 35 bp, Artificial Sequence
  Synthetic oligonucleotide
taacctaccaggccatgcgcaggactgtaatgcca

SEQ ID NO: 375 - DNA, 36 bp, Artificial Sequence
  Synthetic oligonucleotide
gcgccacatcgcaagcttatcgacaccccgctttca

SEQ ID NO: 376 - DNA, 35 bp, Artificial Sequence
  Synthetic oligonucleotide
cccggggctagggatcgggtgcaatcattgaattt

SEQ ID NO: 377 - DNA, 35 bp, Artificial Sequence
  Synthetic oligonucleotide
gcgagcctagcccgtaactggaaggccactactct

SEQ ID NO: 378 - DNA, 37 bp, Artificial Sequence
  Synthetic oligonucleotide
gacgggtgcgggctagcaagctttacctctattatga

SEQ ID NO: 379 - DNA, 35 bp, Artificial Sequence
  Synthetic oligonucleotide
gcgtgccaacgtgactgtgtcgcctttgctctgta

SEQ ID NO: 380 - DNA, 35 bp, Artificial Sequence
  Synthetic oligonucleotide
atcgtaggactgcgaaatcattgcgggtttattgt

SEQ ID NO: 381 - DNA, 35 bp, Artificial Sequence
  Synthetic oligonucleotide
ttacctaccaaggcacgccgttttatataaggtgg

SEQ ID NO: 382 - DNA, 35 bp, Artificial Sequence
  Synthetic oligonucleotide
ccgcgtgcttggattgtgcagtcctccctctgact

SEQ ID NO: 383 - DNA, 36 bp, Artificial Sequence
  Synthetic oligonucleotide
ttacctaccagtgcatggcgataagtctttcctata

SEQ ID NO: 384 - DNA, 35 bp, Artificial Sequence
  Synthetic oligonucleotide
gacgtctgcaggtgagcattggtctacttattggt

SEQ ID NO: 385 - DNA, 38 bp, Artificial Sequence
  Synthetic oligonucleotide
cgcgatcgtagcagtacggaggttcttctagcatatga

SEQ ID NO: 386 - DNA, 35 bp, Artificial Sequence
  Synthetic oligonucleotide
cgcgaatcgtagccgacgtgcttgggcttgcgacc

SEQ ID NO: 387 - DNA, 36 bp, Artificial Sequence
  Synthetic oligonucleotide
aagcacggtacgcacagtccgacttttgccttcaaa

SEQ ID NO: 388 - DNA, 35 bp, Artificial Sequence
  Synthetic oligonucleotide
tccggaactaggagacgtacacgccgcaatgcccc

SEQ ID NO: 389 - DNA, 35 bp, Artificial Sequence
  Synthetic oligonucleotide
ccgcggacctagcgaggacagcgcattgctagcta

SEQ ID NO: 390 - DNA, 35 bp, Artificial Sequence
  Synthetic oligonucleotide
agcccgcgtgcctgggagacgacctccgacttgcg

SEQ ID NO: 391 - DNA, 35 bp, Artificial Sequence
  Synthetic oligonucleotide
gcgtgctaaggtactgtacagtctacgcctatgtt

SEQ ID NO: 392 - DNA, 38 bp, Artificial Sequence
  Synthetic oligonucleotide
taccgcgatactgcacgtgtgcgaccgcttttccttga

SEQ ID NO: 393 - DNA, 36 bp, Artificial Sequence
  Synthetic oligonucleotide
tgacctaccaaggagagtttcatttgatctaaacta

SEQ ID NO: 394 - DNA, 35 bp, Artificial Sequence
  Synthetic oligonucleotide
cttagtgccctaagtctgcgtgactctactgtgcc

SEQ ID NO: 395 - DNA, 36 bp, Artificial Sequence
  Synthetic oligonucleotide
tgcaggcagagcccgttaagctttttatcaactcca

SEQ ID NO: 396 - DNA, 35 bp, Artificial Sequence
  Synthetic oligonucleotide
gaggcgaatcgtagctccacgtggtgccatgcaga

SEQ ID NO: 397 - DNA, 35 bp, Artificial Sequence
  Synthetic oligonucleotide
catccgctagttgcttttaatgaccaccgcttcca

SEQ ID NO: 398 - DNA, 36 bp, Artificial Sequence
  Synthetic oligonucleotide
aagcactgtacaaactggatgcgtacacttcctcca

SEQ ID NO: 399 - DNA, 35 bp, Artificial Sequence
  Synthetic oligonucleotide
gcgtgccaaggtacggaaggtccatgcaacggttt

SEQ ID NO: 400 - DNA, 36 bp, Artificial Sequence
  Synthetic oligonucleotide
cgtgtaccgcttgtaccgtacaaagtcaccttgtta

SEQ ID NO: 401 - DNA, 36 bp, Artificial Sequence
  Synthetic oligonucleotide
catgcgcgctccactggtcttaattttcctccatga

SEQ ID NO: 402 - DNA, 37 bp, Artificial Sequence
  Synthetic oligonucleotide
tctgcgtgctaagagcggccctgtagttgcgccttga

SEQ ID NO: 403 - DNA, 36 bp, Artificial Sequence
  Synthetic oligonucleotide
gcgtgccaacgattctgcgctgggctagtaccatta

SEQ ID NO: 404 - DNA, 35 bp, Artificial Sequence
  Synthetic oligonucleotide
gcgcgctaacggacaaatcccctaacctcgataaa

SEQ ID NO: 405 - DNA, 35 bp, Artificial Sequence
  Synthetic oligonucleotide
attctctaccgtgccacattttatcctctgcaaac

SEQ ID NO: 406 - DNA, 37 bp, Artificial Sequence
  Synthetic oligonucleotide
tgtctggatgccatgcgccacgcttttctcactatga

SEQ ID NO: 407 - DNA, 37 bp, Artificial Sequence
  Synthetic oligonucleotide
atcgtagtgctgcaggatctacctacattattctgga

SEQ ID NO: 408 - DNA, 36 bp, Artificial Sequence
  Synthetic oligonucleotide
gcagtctcatctgtcttctctaccgtgctcgaatca

SEQ ID NO: 409 - DNA, 35 bp, Artificial Sequence
  Synthetic oligonucleotide
gtctccggcgatatctccactgtgcccttctctat

SEQ ID NO: 410 - DNA, 35 bp, Artificial Sequence
  Synthetic oligonucleotide
gcaagtcattccagtcctgactctaccgtgcttac

SEQ ID NO: 411 - DNA, 35 bp, Artificial Sequence
  Synthetic oligonucleotide
gtgatggtcgtgcccgctttatcttacatctgctt

SEQ ID NO: 412 - DNA, 35 bp, Artificial Sequence
  Synthetic oligonucleotide
gcgtcgacgagatttttgacctctaccgtgccgac

SEQ ID NO: 413 - DNA, 35 bp, Artificial Sequence
  Synthetic oligonucleotide
tgcgtcaggcgtccgcttttaccccaccatgcttt

SEQ ID NO: 414 - DNA, 37 bp, Artificial Sequence
  Synthetic oligonucleotide
atgacacgcgcgcctgctagtactgcgctccatgcga

SEQ ID NO: 415 - DNA, 36 bp, Artificial Sequence
  Synthetic oligonucleotide
ggtcaagcattgcgactctaccgtgcctcaaactaa

SEQ ID NO: 416 - DNA, 35 bp, Artificial Sequence
  Synthetic oligonucleotide
cacgtactgtttactctaccgtgcattaaacgttt

SEQ ID NO: 417 - DNA, 35 bp, Artificial Sequence
  Synthetic oligonucleotide
agcaggcccttttcacatactctctactgtgctcc

SEQ ID NO: 418 - DNA, 35 bp, Artificial Sequence
  Synthetic oligonucleotide
taatgcaggagtgtgccaagcttttatttcatgtc

SEQ ID NO: 419 - DNA, 38 bp, Artificial Sequence
  Synthetic oligonucleotide
catgcgaccgctttacctacataggattactcttctga

SEQ ID NO: 420 - DNA, 35 bp, Artificial Sequence
  Synthetic oligonucleotide
ttgcggatctagcaacgaatggaaggaacacgtac

SEQ ID NO: 421 - DNA, 35 bp, Artificial Sequence
  Synthetic oligonucleotide
atcgtagtacccgcgggaaaaaaccacttatcatc

SEQ ID NO: 422 - DNA, 35 bp, Artificial Sequence
  Synthetic oligonucleotide
tcgctgcaccgtgtccatgcggctacaccaattcg

SEQ ID NO: 423 - DNA, 35 bp, Artificial Sequence
  Synthetic oligonucleotide
gcagaataccttactctaccgtgccattaatacat

SEQ ID NO: 424 - DNA, 38 bp, Artificial Sequence
  Synthetic oligonucleotide
gcgccgaatagcctctactgtgcgttaccctggattga

SEQ ID NO: 425 - DNA, 35 bp, Artificial Sequence
  Synthetic oligonucleotide
gcaggccgtatcactctaccgtgcaaaaagtatac

SEQ ID NO: 426 - DNA, 37 bp, Artificial Sequence
  Synthetic oligonucleotide
tactgaggcgacaattctctaccgtgcccccatttga

SEQ ID NO: 427 - DNA, 37 bp, Artificial Sequence
  Synthetic oligonucleotide
gccactagtatcctccactgtgcaaaattacaataga

SEQ ID NO: 428 - DNA, 38 bp, Artificial Sequence
  Synthetic oligonucleotide
ggtattgccgtgtagttcgttctctactgtgcctttga

SEQ ID NO: 429 - DNA, 35 bp, Artificial Sequence
  Synthetic oligonucleotide
cttgcgagattagctttatcacctgttttccgctt

SEQ ID NO: 430 - DNA, 35 bp, Artificial Sequence
  Synthetic oligonucleotide
gcacctctactgtgcccacaacgaattggactcac

SEQ ID NO: 431 - DNA, 35 bp, Artificial Sequence
  Synthetic oligonucleotide
ctccgcggtcatccactgctccattcaactcgcct

SEQ ID NO: 432 - DNA, 35 bp, Artificial Sequence
  Synthetic oligonucleotide
aatctccaccgtgcactatcttgtctcaaagtttc

SEQ ID NO: 433 - DNA, 36 bp, Artificial Sequence
  Synthetic oligonucleotide
gctagctgaattcaccatatctctactgtgcactaa

SEQ ID NO: 434 - DNA, 37 bp, Artificial Sequence
  Synthetic oligonucleotide
ctgcgtgctaagacgtacggtgtcaacatctctccga

SEQ ID NO: 435 - DNA, 35 bp, Artificial Sequence
  Synthetic oligonucleotide
gcgacgggacttagcttatattagatttcgcttct

SEQ ID NO: 436 - DNA, 36 bp, Artificial Sequence
  Synthetic oligonucleotide
catgcggaagcttactcatttttattcgattaccaa

SEQ ID NO: 437 - DNA, 35 bp, Artificial Sequence
  Synthetic oligonucleotide
taacctaccaagcaatcaccgttttggaaatcatt

SEQ ID NO: 438 - DNA, 36 bp, Artificial Sequence
  Synthetic oligonucleotide
gcccagaaaaactctactgtgcgatgacctgttaaa

SEQ ID NO: 439 - DNA, 36 bp, Artificial Sequence
  Synthetic oligonucleotide
tccgcgtgcctggaaaggtactgtccacttgaacaa

SEQ ID NO: 440 - DNA, 38 bp, Artificial Sequence
  Synthetic oligonucleotide
gagtttgcaggcttggggactctactgtgcaattttga

SEQ ID NO: 441 - DNA, 36 bp, Artificial Sequence
  Synthetic oligonucleotide
ttcgcctccaccgtgcatttctaactttatttctta

SEQ ID NO: 442 - DNA, 35 bp, Artificial Sequence
  Synthetic oligonucleotide
ccctcggactgagcactgcatacaagaagccttgc

SEQ ID NO: 443 - DNA, 37 bp, Artificial Sequence
  Synthetic oligonucleotide
cccgtgcctccccttatctctaccgtgcctcctatga

SEQ ID NO: 444 - DNA, 36 bp, Artificial Sequence
  Synthetic oligonucleotide
actcagtcatcgtacgctttccgatatcgctttata

SEQ ID NO: 445 - DNA, 35 bp, Artificial Sequence
  Synthetic oligonucleotide
tacgcgtgccaggaactgtaccagtcttatgccgc

SEQ ID NO: 446 - DNA, 36 bp, Artificial Sequence
  Synthetic oligonucleotide
gcggatttggtctctaccgtgcctactactagttaa

SEQ ID NO: 447 - DNA, 38 bp, Artificial Sequence
  Synthetic oligonucleotide
ggcacggaatgcatcgtgtcatggcgtctttcccctga

SEQ ID NO: 448 - DNA, 35 bp, Artificial Sequence
  Synthetic oligonucleotide
gtgcaggccacccagatctctactgtgcctcttac

SEQ ID NO: 449 - DNA, 35 bp, Artificial Sequence
  Synthetic oligonucleotide
atcgtaggactgcacatcgtagtttagttactcac

SEQ ID NO: 450 - DNA, 35 bp, Artificial Sequence
  Synthetic oligonucleotide
tcacctacaaatgtcaggcatatactactctatta

SEQ ID NO: 451 - DNA, 36 bp, Artificial Sequence
  Synthetic oligonucleotide
gtacaagcagtttggcgtatatctctactgtgctga

SEQ ID NO: 452 - DNA, 35 bp, Artificial Sequence
  Synthetic oligonucleotide
gataacgtttgattactccactgtgccataccctt

SEQ ID NO: 453 - DNA, 37 bp, Artificial Sequence
  Synthetic oligonucleotide
tgagcgatcgtagccaacgtactgcctttcctattga

SEQ ID NO: 454 - DNA, 35 bp, Artificial Sequence
  Synthetic oligonucleotide
gcgtcgaccacgttaatatttaccctctactgtgc

SEQ ID NO: 455 - DNA, 35 bp, Artificial Sequence
  Synthetic oligonucleotide
gcctggtcaactcgccgcaatacttttacccatcc

SEQ ID NO: 456 - DNA, 37 bp, Artificial Sequence
  Synthetic oligonucleotide
gtcaccctaaccgtattctccaccgtgccttacttga

SEQ ID NO: 457 - DNA, 35 bp, Artificial Sequence
  Synthetic oligonucleotide
gatagaattgagctctactgtgcctatctggttat

SEQ ID NO: 458 - DNA, 35 bp, Artificial Sequence
  Synthetic oligonucleotide
gtccaaattagctctctactgtgcctatccgttaa

SEQ ID NO: 459 - DNA, 37 bp, Artificial Sequence
  Synthetic oligonucleotide
gcgcacttgttcttcttggtcgcggcgtgccacgcga

SEQ ID NO: 460 - DNA, 36 bp, Artificial Sequence
  Synthetic oligonucleotide
gcggtcagagctaattctgtcaactcgccctttcta

SEQ ID NO: 461 - DNA, 36 bp, Artificial Sequence
  Synthetic oligonucleotide
gagcggaactagcgatgcgtacaaggttaatttcta

SEQ ID NO: 462 - DNA, 35 bp, Artificial Sequence
  Synthetic oligonucleotide
aacactctactgtgcctccacgatattttcatact

SEQ ID NO: 463 - DNA, 35 bp, Artificial Sequence
  Synthetic oligonucleotide
gtagtgatgccacctcaactgtgcccttgttttct

SEQ ID NO: 464 - DNA, 36 bp, Artificial Sequence
  Synthetic oligonucleotide
ttcctgcagttctattctctactgtgccctttgtta

SEQ ID NO: 465 - DNA, 37 bp, Artificial Sequence
  Synthetic oligonucleotide
gactgctctcatagtatgaactccactgtgcccttga

SEQ ID NO: 466 - DNA, 38 bp, Artificial Sequence
  Synthetic oligonucleotide
accatgcgcgcaaccttctctaccgtgcatctttttga

SEQ ID NO: 467 - DNA, 36 bp, Artificial Sequence
  Synthetic oligonucleotide
gcgttatacctccactgtgctcaattttcatctaaa

SEQ ID NO: 468 - DNA, 38 bp, Artificial Sequence
  Synthetic oligonucleotide
acgcgtgcctggtttactgcagacgagccccttcatga

SEQ ID NO: 469 - DNA, 38 bp, Artificial Sequence
  Synthetic oligonucleotide
gcacacacactttactctaccgtgccattttgaagtga

SEQ ID NO: 470 - DNA, 38 bp, Artificial Sequence
  Synthetic oligonucleotide
atctgcgggcatccatagataatactctactgtgctga

SEQ ID NO: 471 - DNA, 35 bp, Artificial Sequence
  Synthetic oligonucleotide
aaatcattcctgtggtctctctaccgtgccaatat

SEQ ID NO: 472 - DNA, 36 bp, Artificial Sequence
  Synthetic oligonucleotide
gccataacctatctctactgtgctaaaccggttaca

SEQ ID NO: 473 - DNA, 38 bp, Artificial Sequence
  Synthetic oligonucleotide
gcgactctacggaaatttgggatctctaccgtgcctga

SEQ ID NO: 474 - DNA, 35 bp, Artificial Sequence
  Synthetic oligonucleotide
acctctactgtgccgattccattgttcttccactc

SEQ ID NO: 475 - DNA, 35 bp, Artificial Sequence
  Synthetic oligonucleotide
gcgaccaagccattccaaactagccctgatttcaa

SEQ ID NO: 476 - DNA, 36 bp, Artificial Sequence
  Synthetic oligonucleotide
ctgtacggctgtctgggcctagtattcccgctttaa

SEQ ID NO: 477 - DNA, 36 bp, Artificial Sequence
  Synthetic oligonucleotide
gggaactgcaggttaaactctactgtgctatgttta

SEQ ID NO: 478 - DNA, 36 bp, Artificial Sequence
  Synthetic oligonucleotide
gcgtgggttcctctaccgtgccgaggttgttcctaa

SEQ ID NO: 479 - DNA, 38 bp, Artificial Sequence
  Synthetic oligonucleotide
tcgcggtcagcaattctccaccgtgcgattacctttga

SEQ ID NO: 480 - DNA, 36 bp, Artificial Sequence
  Synthetic oligonucleotide
tacacgtcaccttactctactgtgccgtaatcctca

SEQ ID NO: 481 - DNA, 38 bp, Artificial Sequence
  Synthetic oligonucleotide
atgcactgtacgcaggtcacgcgttttaccactactga

SEQ ID NO: 482 - DNA, 38 bp, Artificial Sequence
  Synthetic oligonucleotide
gttgcgtgctaacacacgtgactgcctatttcctatga

SEQ ID NO: 483 - DNA, 38 bp, Artificial Sequence
  Synthetic oligonucleotide
gctactgcgataactctaccgtgccactcccttgttga

SEQ ID NO: 484 - DNA, 36 bp, Artificial Sequence
  Synthetic oligonucleotide
tatccaaccactagtaagcctccaccgtgccattta

SEQ ID NO: 485 - DNA, 37 bp, Artificial Sequence
  Synthetic oligonucleotide
gctagttaccagtaacctctaccgtgcctcttctgga

SEQ ID NO: 486 - DNA, 36 bp, Artificial Sequence
  Synthetic oligonucleotide
cggcgaactcctctgtagcagtcgtgcggttcataa

SEQ ID NO: 487 - DNA, 35 bp, Artificial Sequence
  Synthetic oligonucleotide
aactgcgtgcctagtacggacttgcacccttgtgg

SEQ ID NO: 488 - DNA, 35 bp, Artificial Sequence
  Synthetic oligonucleotide
gcaggatccgttctttcaactcgcctatttctgga

SEQ ID NO: 489 - DNA, 35 bp, Artificial Sequence
  Synthetic oligonucleotide
actgcgaagccttgcatccaattactctactgtgc

SEQ ID NO: 490 - DNA, 35 bp, Artificial Sequence
  Synthetic oligonucleotide
gcgataatcttgtcattactctaccgtgccgttta

SEQ ID NO: 491 - DNA, 36 bp, Artificial Sequence
  Synthetic oligonucleotide
atgccggcctattactacctaactctactgtgctta

SEQ ID NO: 492 - DNA, 37 bp, Artificial Sequence
  Synthetic oligonucleotide
gcgatcaagcgtatttcttcttacctctactgtgcga

SEQ ID NO: 493 - DNA, 38 bp, Artificial Sequence
  Synthetic oligonucleotide
gatgacacgccctttccactccactgtgcctgttttga

SEQ ID NO: 494 - DNA, 36 bp, Artificial Sequence
  Synthetic oligonucleotide
tacatactccactgtgccacctttcccgactttcca

SEQ ID NO: 495 - DNA, 35 bp, Artificial Sequence
  Synthetic oligonucleotide
catgcaagattttgcgtaacttaattaattgcttt

SEQ ID NO: 496 - DNA, 35 bp, Artificial Sequence
  Synthetic oligonucleotide
gcactatatccgtacctaaacctccactgtgcttt

SEQ ID NO: 497 - DNA, 35 bp, Artificial Sequence
  Synthetic oligonucleotide
gcgctataactccgatgtattctccaccgtgccca

SEQ ID NO: 498 - DNA, 36 bp, Artificial Sequence
  Synthetic oligonucleotide
atcgtagtgctgcaggaaacgagattgatgcaccca

SEQ ID NO: 499 - DNA, 35 bp, Artificial Sequence
  Synthetic oligonucleotide
tgcgagtgggatttcgtccgacacctcaccatgca

SEQ ID NO: 500 - DNA, 35 bp, Artificial Sequence
  Synthetic oligonucleotide
agggtcatctagaacggttgacacgaaccgttgct

SEQ ID NO: 501 - DNA, 35 bp, Artificial Sequence
  Synthetic oligonucleotide
gctaggaaaggacccaaatctctactgtgcctacc

SEQ ID NO: 502 - DNA, 35 bp, Artificial Sequence
  Synthetic oligonucleotide
gcgaggaatacctatctctactgtgccaccaaacg

SEQ ID NO: 503 - DNA, 36 bp, Artificial Sequence
  Synthetic oligonucleotide
gccgtttactctaccgtgccgtatcgatttccatta

SEQ ID NO: 504 - DNA, 35 bp, Artificial Sequence
  Synthetic oligonucleotide
aggtcgtgcgtcccgttcaactagccctgttctca

SEQ ID NO: 505 - DNA, 35 bp, Artificial Sequence
  Synthetic oligonucleotide
cattgcgttctggctttcgttcattttcgctttac

SEQ ID NO: 506 - DNA, 35 bp, Artificial Sequence
  Synthetic oligonucleotide
gcactcatcgcggattatctccaccgtgccgacct

SEQ ID NO: 507 - DNA, 35 bp, Artificial Sequence
  Synthetic oligonucleotide
catgccagctttaactttgagatctgttagttttc

SEQ ID NO: 508 - DNA, 36 bp, Artificial Sequence
  Synthetic oligonucleotide
gccaggatctcaactgtgccattgcctttttctgaa

SEQ ID NO: 509 - DNA, 38 bp, Artificial Sequence
  Synthetic oligonucleotide
ttacctccaccgtgccaatcactgtttgatcgccttga

SEQ ID NO: 510 - DNA, 36 bp, Artificial Sequence
  Synthetic oligonucleotide
taacctaccaagtccaatttggagtctctacgatta

SEQ ID NO: 511 - DNA, 35 bp, Artificial Sequence
  Synthetic oligonucleotide
gcctcaacttgagtttctatcattctccactgtgc

SEQ ID NO: 512 - DNA, 37 bp, Artificial Sequence
  Synthetic oligonucleotide
catagctgcatactctaccgtgcactcattccctaga

SEQ ID NO: 513 - DNA, 37 bp, Artificial Sequence
  Synthetic oligonucleotide
gacatcaactgcgaactcccctgagtgtgatatcgga

SEQ ID NO: 514 - DNA, 35 bp, Artificial Sequence
  Synthetic oligonucleotide
tatctccaccgtgcccgttaataatctgatctgaa

SEQ ID NO: 515 - DNA, 36 bp, Artificial Sequence
  Synthetic oligonucleotide
tgcgtgccaaacggactcaaggtaccatgcatcaca

SEQ ID NO: 516 - DNA, 36 bp, Artificial Sequence
  Synthetic oligonucleotide
acatagactgccgagcgttcttctctaccgtgccca

SEQ ID NO: 517 - DNA, 36 bp, Artificial Sequence
  Synthetic oligonucleotide
atgaccgaggtacccgacggcctcataggatccata

SEQ ID NO: 518 - DNA, 35 bp, Artificial Sequence
  Synthetic oligonucleotide
gcggttatggggttctcaactgtgccaatctccat

SEQ ID NO: 519 - DNA, 35 bp, Artificial Sequence
  Synthetic oligonucleotide
gggtcatgcgatttctttgttcactcaactcgccc

SEQ ID NO: 520 - DNA, 37 bp, Artificial Sequence
  Synthetic oligonucleotide
gctgttgcgtccatatctccactgtgcttttggttga

SEQ ID NO: 521 - DNA, 35 bp, Artificial Sequence
  Synthetic oligonucleotide
atgcgtgccaatacgacgtcaggccatgaagccat

SEQ ID NO: 522 - DNA, 36 bp, Artificial Sequence
  Synthetic oligonucleotide
atgaactggtggacctttatcctctactgtgcaaaa

SEQ ID NO: 523 - DNA, 35 bp, Artificial Sequence
  Synthetic oligonucleotide
ccgcgtgcctggaccttgcacgacatgcggcaata

SEQ ID NO: 524 - DNA, 38 bp, Artificial Sequence
  Synthetic oligonucleotide
tctgcgggctagtatctaatgatctctaccgtgcttga

SEQ ID NO: 525 - DNA, 34 bp, Artificial Sequence
  Synthetic oligonucleotide
catgcggaggcttttaacaccatgcattctcacc

SEQ ID NO: 526 - DNA, 37 bp, Artificial Sequence
  Synthetic oligonucleotide
ttacgtatctgagcgctagtaccagtacctcgagtga

SEQ ID NO: 527 - DNA, 35 bp, Artificial Sequence
  Synthetic oligonucleotide
agtcaggcccgcttttatttttgtggttatttttg

SEQ ID NO: 528 - DNA, 38 bp, Artificial Sequence
  Synthetic oligonucleotide
cttgccctccgacatgaactctactgtgcaacctatga

SEQ ID NO: 529 - DNA, 32 bp, Artificial Sequence
  Synthetic oligonucleotide
atcgcgtgccagaacgtaactcgcccatcgac

SEQ ID NO: 530 - DNA, 35 bp, Artificial Sequence
  Synthetic oligonucleotide
tgacgcgtgcttggcaacgtggcaggacaattatt

SEQ ID NO: 531 - DNA, 36 bp, Artificial Sequence
  Synthetic oligonucleotide
accgcgtgattggaagatactgcgtcttcgatttaa

SEQ ID NO: 532 - DNA, 35 bp, Artificial Sequence
  Synthetic oligonucleotide
gtgtgctgaccttagcaaccgaactgaggccctac

SEQ ID NO: 533 - DNA, 36 bp, Artificial Sequence
  Synthetic oligonucleotide
gcgcgccaaggtactgcggatagcgcattggacaca

SEQ ID NO: 534 - DNA, 35 bp, Artificial Sequence
  Synthetic oligonucleotide
taccgacgcgctattttctactctactgtgctcat

SEQ ID NO: 535 - DNA, 35 bp, Artificial Sequence
  Synthetic oligonucleotide
aaccgaacgtccgataaactcgccctactaatact

SEQ ID NO: 536 - DNA, 35 bp, Artificial Sequence
  Synthetic oligonucleotide
accaggtccactttcggtgatagaccctgcacaca

SEQ ID NO: 537 - DNA, 35 bp, Artificial Sequence
  Synthetic oligonucleotide
taaattgcccgtttgttctctactgtgccactccg

SEQ ID NO: 538 - DNA, 38 bp, Artificial Sequence
  Synthetic oligonucleotide
gccaccttgactctgatccaactctactgtgccattga

SEQ ID NO: 539 - DNA, 38 bp, Artificial Sequence
  Synthetic oligonucleotide
cgtgccaccgctggcttcctacttcgctttaactatga

SEQ ID NO: 540 - DNA, 35 bp, Artificial Sequence
  Synthetic oligonucleotide
tgttctctactgtgcccgataacacgcttttgttc

SEQ ID NO: 541 - DNA, 36 bp, Artificial Sequence
  Synthetic oligonucleotide
ctggtgctgcaccgtgtcacctatctttacgcatta

SEQ ID NO: 542 - DNA, 36 bp, Artificial Sequence
  Synthetic oligonucleotide
atcgtagtacgaagctagccataacctgttatctca

SEQ ID NO: 543 - DNA, 38 bp, Artificial Sequence
  Synthetic oligonucleotide
gcgtgttttatctctactgtgcgaacgtttggaattga

SEQ ID NO: 544 - DNA, 38 bp, Artificial Sequence
  Synthetic oligonucleotide
agctaggggtatctctactgtgcgattcttccgggtga

SEQ ID NO: 545 - DNA, 36 bp, Artificial Sequence
  Synthetic oligonucleotide
cgtgcccgctttattctccctggcttattggtccca

SEQ ID NO: 546 - DNA, 38 bp, Artificial Sequence
  Synthetic oligonucleotide
gatgcgccgctttacactcttgttcttacccgctttga

SEQ ID NO: 547 - DNA, 35 bp, Artificial Sequence
  Synthetic oligonucleotide
ggggcatgtaccaaccgttatttactctactgtgc

SEQ ID NO: 548 - DNA, 35 bp, Artificial Sequence
  Synthetic oligonucleotide
gcatcgtgtccatgcccaaatggttcgtcttttta

SEQ ID NO: 549 - DNA, 38 bp, Artificial Sequence
  Synthetic oligonucleotide
atgcactggacgcgcatgtcgtttcatttctccattga

SEQ ID NO: 550 - DNA, 34 bp, Artificial Sequence
  Synthetic oligonucleotide
aagcacgggctgcattcgattcaggtaaacaatt

SEQ ID NO: 551 - DNA, 37 bp, Artificial Sequence
  Synthetic oligonucleotide
acacccgcatgaggtatcctgtggatcgtgggacgga

SEQ ID NO: 552 - DNA, 35 bp, Artificial Sequence
  Synthetic oligonucleotide
gccagctttcgttcatataccactatcgctttgta

SEQ ID NO: 553 - DNA, 38 bp, Artificial Sequence
  Synthetic oligonucleotide
acagtcataacagactccgctgcgtgctaagcggatga

SEQ ID NO: 554 - DNA, 36 bp, Artificial Sequence
  Synthetic oligonucleotide
gcgcgctaacgggtatctgcaggtcctactagttta

SEQ ID NO: 555 - DNA, 35 bp, Artificial Sequence
  Synthetic oligonucleotide
atgcacctgtctgtcagtccccgctaggccatatt

SEQ ID NO: 556 - DNA, 38 bp, Artificial Sequence
  Synthetic oligonucleotide
ccatgcgcccggttgagatttaacggatctcgctttga

SEQ ID NO: 557 - DNA, 35 bp, Artificial Sequence
  Synthetic oligonucleotide
gcacacctcgctttaacacttgtaactacgcttca

SEQ ID NO: 558 - DNA, 35 bp, Artificial Sequence
  Synthetic oligonucleotide
tcacctactaaggactgatagctgcctacattgtt

SEQ ID NO: 559 - DNA, 36 bp, Artificial Sequence
  Synthetic oligonucleotide
ccacgagtctaggggcgtaacgcagtaaggcataca

SEQ ID NO: 560 - DNA, 38 bp, Artificial Sequence
  Synthetic oligonucleotide
acatgcgtgctaaggtactactggtgtcgaacctttga

SEQ ID NO: 561 - DNA, 35 bp, Artificial Sequence
  Synthetic oligonucleotide
atcgtagtacatacagtgcgtttcgtaaattgcct

SEQ ID NO: 562 - DNA, 35 bp, Artificial Sequence
  Synthetic oligonucleotide
gcgccccgactgccactagcttttaattctcgctt

SEQ ID NO: 563 - DNA, 36 bp, Artificial Sequence
  Synthetic oligonucleotide
tgctagctggcccatactcaactgtgcgttactcaa

SEQ ID NO: 564 - DNA, 35 bp, Artificial Sequence
  Synthetic oligonucleotide
actctgcatccttcaactctactgtgcggttattt

SEQ ID NO: 565 - DNA, 38 bp, Artificial Sequence
  Synthetic oligonucleotide
gctaactgcagggcacacaatctcttaaggcttaatga

SEQ ID NO: 566 - DNA, 35 bp, Artificial Sequence
  Synthetic oligonucleotide
gcgtgggcctggtctttactactaaacaaattggt

SEQ ID NO: 567 - DNA, 35 bp, Artificial Sequence
  Synthetic oligonucleotide
gatcgtaacgcactgagggtcaggcattacccgcc

SEQ ID NO: 568 - DNA, 37 bp, Artificial Sequence
  Synthetic oligonucleotide
gcccggggctaggggaaagaacctgccggtcatggga

SEQ ID NO: 569 - DNA, 35 bp, Artificial Sequence
  Synthetic oligonucleotide
gcgacctagggtaacgatcgtagttcacccataat

SEQ ID NO: 570 - DNA, 36 bp, Artificial Sequence
  Synthetic oligonucleotide
ttacctaccacagtctccgcctcgttatccttatca

SEQ ID NO: 571 - DNA, 36 bp, Artificial Sequence
  Synthetic oligonucleotide
gccgcgtgcctggccgtggtgcatcactaagttgaa

SEQ ID NO: 572 - DNA, 35 bp, Artificial Sequence
  Synthetic oligonucleotide
ggcgcgcgctagccatacgaactgcttgaacattt

SEQ ID NO: 573 - DNA, 37 bp, Artificial Sequence
  Synthetic oligonucleotide
tgcgaatcgtagccatcgtccactgctgatttgcgga

SEQ ID NO: 574 - DNA, 36 bp, Artificial Sequence
  Synthetic oligonucleotide
gcgaccgattcttctctcaaacgcttacttctatga

SEQ ID NO: 575 - DNA, 35 bp, Artificial Sequence
  Synthetic oligonucleotide
gccaaatgatctccactgtgcgaaatgggcttttt

SEQ ID NO: 576 - DNA, 38 bp, Artificial Sequence
  Synthetic oligonucleotide
tgagcacacaatggacgtgacaccaatctttcttatga

SEQ ID NO: 577 - DNA, 36 bp, Artificial Sequence
  Synthetic oligonucleotide
tcatcacgcgctagtgaacgtgttgtagcaccccta

SEQ ID NO: 578 - DNA, 36 bp, Artificial Sequence
  Synthetic oligonucleotide
tcatgtgcgtgccaactgacgaggtgcaggctagcc

SEQ ID NO: 579 - DNA, 38 bp, Artificial Sequence
  Synthetic oligonucleotide
atcgtagctgctgcagtcccctgtcttaatatccctga

SEQ ID NO: 580 - DNA, 36 bp, Artificial Sequence
  Synthetic oligonucleotide
cgtatcgtagacgttacggaaggagataatgcgcaa

SEQ ID NO: 581 - DNA, 36 bp, Artificial Sequence
  Synthetic oligonucleotide
cttgccagctttccttgtcttcgctttcattacata

SEQ ID NO: 582 - DNA, 38 bp, Artificial Sequence
  Synthetic oligonucleotide
gctgtcattgaatctctactgtgcgatccactttttga

SEQ ID NO: 583 - DNA, 38 bp, Artificial Sequence
  Synthetic oligonucleotide
catgcgccagcttcttctgattttatctatctctatga

SEQ ID NO: 584 - DNA, 36 bp, Artificial Sequence
  Synthetic oligonucleotide
ccatgcccgcttaagcttcttttctatgtttctacg

SEQ ID NO: 585 - DNA, 35 bp, Artificial Sequence
  Synthetic oligonucleotide
tagcaggagtaccctccaccgtgcacattgtttcc

SEQ ID NO: 586 - DNA, 37 bp, Artificial Sequence
  Synthetic oligonucleotide
catgcccgctttgtttctccgctttttggtattccga

SEQ ID NO: 587 - DNA, 36 bp, Artificial Sequence
  Synthetic oligonucleotide
atgcacgtcgaaaggcatgcggtacaactcctatga

SEQ ID NO: 588 - DNA, 35 bp, Artificial Sequence
  Synthetic oligonucleotide
agacagcaggcatagcggggaacctctaccgtgcc

SEQ ID NO: 589 - DNA, 35 bp, Artificial Sequence
  Synthetic oligonucleotide
aagtaacgcgggttacaactttttctccaccgtgc

SEQ ID NO: 590 - DNA, 36 bp, Artificial Sequence
  Synthetic oligonucleotide
acagtctcatgcccgcttttaatcataccgcttaca

SEQ ID NO: 591 - DNA, 38 bp, Artificial Sequence
  Synthetic oligonucleotide
gcgcccgaccattccctaagcttttgaccccactatga

SEQ ID NO: 592 - DNA, 37 bp, Artificial Sequence
  Synthetic oligonucleotide
gcgacgactatcgcttgttcttgaatacctcgcttta

SEQ ID NO: 593 - DNA, 34 bp, Artificial Sequence
  Synthetic oligonucleotide
aaactctactgtgcctcagtttcaaaccggttct

SEQ ID NO: 594 - DNA, 35 bp, Artificial Sequence
  Synthetic oligonucleotide
gtcgtagtactgcgaaatgggccatgcgcaaactt

SEQ ID NO: 595 - DNA, 35 bp, Artificial Sequence
  Synthetic oligonucleotide
cgtgcggatttctccaccgtgcttttgacctctga

SEQ ID NO: 596 - DNA, 38 bp, Artificial Sequence
  Synthetic oligonucleotide
gactgcgacctacacttatttgctctactgtgccttga

SEQ ID NO: 597 - DNA, 35 bp, Artificial Sequence
  Synthetic oligonucleotide
catgcggcttctaccaggtcaaactagccccaatt

SEQ ID NO: 598 - DNA, 36 bp, Artificial Sequence
  Synthetic oligonucleotide
aaccggagctaggtacgtgtctgtcaggcatgaaga

SEQ ID NO: 599 - DNA, 36 bp, Artificial Sequence
  Synthetic oligonucleotide
atgagtccgcgtgcctggacctttacccccgacgaa

SEQ ID NO: 600 - DNA, 38 bp, Artificial Sequence
  Synthetic oligonucleotide
catgccgtacgcttattggatacaccatcgctttttga

SEQ ID NO: 601 - DNA, 37 bp, Artificial Sequence
  Synthetic oligonucleotide
gcgttggtgttcctctctactgtgcctgattttttga

SEQ ID NO: 602 - DNA, 37 bp, Artificial Sequence
  Synthetic oligonucleotide
atcgtagtactgcacgggtgccacgtgtcttcccaga

SEQ ID NO: 603 - DNA, 35 bp, Artificial Sequence
  Synthetic oligonucleotide
aggcacgtacaggcatcgaccgctttcttctttcc

SEQ ID NO: 604 - DNA, 36 bp, Artificial Sequence
  Synthetic oligonucleotide
gccatgcgggataatattaaatcctctaccgtgcca

SEQ ID NO: 605 - DNA, 37 bp, Artificial Sequence
  Synthetic oligonucleotide
tctgccatgcggctcattccgaaactctactgtgcga

SEQ ID NO: 606 - DNA, 35 bp, Artificial Sequence
  Synthetic oligonucleotide
ttttgcgattcctctactgtgccttctggttttgt

SEQ ID NO: 607 - DNA, 35 bp, Artificial Sequence
  Synthetic oligonucleotide
ctgcagcaatcatgcaggctttcatcgctttcatc

SEQ ID NO: 608 - DNA, 35 bp, Artificial Sequence
  Synthetic oligonucleotide
tcacctaccaagatctctcgcgccctatagtttct

SEQ ID NO: 609 - DNA, 35 bp, Artificial Sequence
  Synthetic oligonucleotide
caccgcgtgccaggggatcggaatgatatcaactg

SEQ ID NO: 610 - DNA, 36 bp, Artificial Sequence
  Synthetic oligonucleotide
taaactaccaagggcatgccaccatctactacatga

SEQ ID NO: 611 - DNA, 35 bp, Artificial Sequence
  Synthetic oligonucleotide
atcgtagtactgaaaagcgggatccagttctaatt

SEQ ID NO: 612 - DNA, 35 bp, Artificial Sequence
  Synthetic oligonucleotide
gaaggcaagcacccccctgctcaactagccaacaa

SEQ ID NO: 613 - DNA, 38 bp, Artificial Sequence
  Synthetic oligonucleotide
ctgccctcgttctccaccgtgcccactttgtaaactga

SEQ ID NO: 614 - DNA, 36 bp, Artificial Sequence
  Synthetic oligonucleotide
gatgcaagggcccgttagtactggggtctaattaaa

SEQ ID NO: 615 - DNA, 38 bp, Artificial Sequence
  Synthetic oligonucleotide
catgcgatggtcttgcacttggttagtaatctccttga

SEQ ID NO: 616 - DNA, 35 bp, Artificial Sequence
  Synthetic oligonucleotide
gtgcgcgctaacacggagagtctcaacttaacctg

SEQ ID NO: 617 - DNA, 36 bp, Artificial Sequence
  Synthetic oligonucleotide
aacaaattgccgtggggacgtggtcatgcggattta

SEQ ID NO: 618 - DNA, 36 bp, Artificial Sequence
  Synthetic oligonucleotide
gcgtggcacgaagctttctatttttacttgattcca

SEQ ID NO: 619 - DNA, 35 bp, Artificial Sequence
  Synthetic oligonucleotide
caatgccagcttacgtttatatcccaattcgcttt

SEQ ID NO: 620 - DNA, 35 bp, Artificial Sequence
  Synthetic oligonucleotide
aacggtcatgccagcttttggtacttagttctcct

SEQ ID NO: 621 - DNA, 37 bp, Artificial Sequence
  Synthetic oligonucleotide
gaacgcaggcatccgcattagctttttccttctatga

SEQ ID NO: 622 - DNA, 36 bp, Artificial Sequence
  Synthetic oligonucleotide
gcgccccgtacagcatcgtgtcatggacctacccta

SEQ ID NO: 623 - DNA, 37 bp, Artificial Sequence
  Synthetic oligonucleotide
tcgtagtaactgcaggatccactccactctcatttga

SEQ ID NO: 624 - DNA, 35 bp, Artificial Sequence
  Synthetic oligonucleotide
atgcactgtacgagcgggatcgctagtttacaaca

SEQ ID NO: 625 - DNA, 35 bp, Artificial Sequence
  Synthetic oligonucleotide
gcgcgctaacgtcactgcacatccagggccctatc

SEQ ID NO: 626 - DNA, 38 bp, Artificial Sequence
  Synthetic oligonucleotide
acccgatcgtagggaacgtaccgataacaaaattatga

SEQ ID NO: 627 - DNA, 36 bp, Artificial Sequence
  Synthetic oligonucleotide
actggtaggcatcgacctcaagctttctcaacatca

SEQ ID NO: 628 - DNA, 35 bp, Artificial Sequence
  Synthetic oligonucleotide
acacctaccaggtcacgcgttcgaacttcacttaa

SEQ ID NO: 629 - DNA, 35 bp, Artificial Sequence
  Synthetic oligonucleotide
accgcgcgctagggacgggatgcttcggcctgtta

SEQ ID NO: 630 - DNA, 35 bp, Artificial Sequence
  Synthetic oligonucleotide
taagcaactagggtgctgtcatcgcgatctctttt

SEQ ID NO: 631 - DNA, 35 bp, Artificial Sequence
  Synthetic oligonucleotide
atcccgggactagggcgacgtgatgcatctctcat

SEQ ID NO: 632 - DNA, 35 bp, Artificial Sequence
  Synthetic oligonucleotide
gacaaggtctgcccgcttcccacactacgcttaca

SEQ ID NO: 633 - DNA, 36 bp, Artificial Sequence
  Synthetic oligonucleotide
gcgcccgcttctcataactatggctttattctcaca

SEQ ID NO: 634 - DNA, 36 bp, Artificial Sequence
  Synthetic oligonucleotide
tgctccgggcctaggagattctacgtacgcaatgca

SEQ ID NO: 635 - DNA, 36 bp, Artificial Sequence
  Synthetic oligonucleotide
gccagactcgccccctatttttttggaactcgccta

SEQ ID NO: 636 - DNA, 38 bp, Artificial Sequence
  Synthetic oligonucleotide
gcatccgttaaactcgcctctcaaatcgaatcccatga

SEQ ID NO: 637 - DNA, 35 bp, Artificial Sequence
  Synthetic oligonucleotide
ctcgcagcatgcgaaggctttactcacaactatcg

SEQ ID NO: 638 - DNA, 37 bp, Artificial Sequence
  Synthetic oligonucleotide
ccgtgcgaacgttatgcgaccatgcgctctctcttga

SEQ ID NO: 639 - DNA, 38 bp, Artificial Sequence
  Synthetic oligonucleotide
gtctagccgcttttgttatgatattcttctctttatga

SEQ ID NO: 640 - DNA, 36 bp, Artificial Sequence
  Synthetic oligonucleotide
gcgtgccaacgtaccttccttatctggtgaactaca

SEQ ID NO: 641 - DNA, 35 bp, Artificial Sequence
  Synthetic oligonucleotide
gtgcgcgctaacactcctctcggtcatttgctgga

SEQ ID NO: 642 - DNA, 35 bp, Artificial Sequence
  Synthetic oligonucleotide
agcgcgtgattgcacgtgactgcacttctaatctt

SEQ ID NO: 643 - DNA, 35 bp, Artificial Sequence
  Synthetic oligonucleotide
tccgaacctaggaagccggatggaacatgcgccca

SEQ ID NO: 644 - DNA, 35 bp, Artificial Sequence
  Synthetic oligonucleotide
catcgcaagctttaatacaaaccctatccattgct

SEQ ID NO: 645 - DNA, 36 bp, Artificial Sequence
  Synthetic oligonucleotide
actgcgtgccgagtacaggactacagttaatggcaa

SEQ ID NO: 646 - DNA, 35 bp, Artificial Sequence
  Synthetic oligonucleotide
ccatgcgtgcctatggacgtccccaaacattgtct

SEQ ID NO: 647 - DNA, 35 bp, Artificial Sequence
  Synthetic oligonucleotide
tatcgcgggcaggcgattcgcttgtatttaatccg

SEQ ID NO: 648 - DNA, 36 bp, Artificial Sequence
  Synthetic oligonucleotide
actgcaccgtgtcatggcgagagctcacctaattca

SEQ ID NO: 649 - DNA, 35 bp, Artificial Sequence
  Synthetic oligonucleotide
gacatgcaaaggcccttaattgactccactgtgcc

SEQ ID NO: 650 - DNA, 35 bp, Artificial Sequence
  Synthetic oligonucleotide
catttgcgtgcctaaatgcggcgcgggctggcgac

SEQ ID NO: 651 - DNA, 35 bp, Artificial Sequence
  Synthetic oligonucleotide
gctggccaatgtatctcaaccgtgccgaaattatt

SEQ ID NO: 652 - DNA, 35 bp, Artificial Sequence
  Synthetic oligonucleotide
tgctaggactagccggttttctattactctatttt

SEQ ID NO: 653 - DNA, 36 bp, Artificial Sequence
  Synthetic oligonucleotide
tccggagctaggaactacggcgatctctgcgcctaa

SEQ ID NO: 654 - DNA, 35 bp, Artificial Sequence
  Synthetic oligonucleotide
gcctagtggacaccccgattcgaccttttttgctt

SEQ ID NO: 655 - DNA, 36 bp, Artificial Sequence
  Synthetic oligonucleotide
agtggaccaacggatcgcgtgccaggccgatgggca

SEQ ID NO: 656 - DNA, 36 bp, Artificial Sequence
  Synthetic oligonucleotide
gataaccagtgtcatgcaaacactatacattcctta

SEQ ID NO: 657 - DNA, 35 bp, Artificial Sequence
  Synthetic oligonucleotide
actgcacaacattgattctgacaggttgacaccaa

SEQ ID NO: 658 - DNA, 38 bp, Artificial Sequence
  Synthetic oligonucleotide
agtgcgcaatagtgcgacaagcttctatccatttttga

SEQ ID NO: 659 - DNA, 36 bp, Artificial Sequence
  Synthetic oligonucleotide
gctgacgttcgtagtccatgtacgggctgtcatcaa

SEQ ID NO: 660 - DNA, 36 bp, Artificial Sequence
  Synthetic oligonucleotide
tcgtgcagtatcgcggtcatgtcacactcccgtaca

SEQ ID NO: 661 - DNA, 36 bp, Artificial Sequence
  Synthetic oligonucleotide
agcacgatcgtagtgcgaatcgaacggggtctgcga

SEQ ID NO: 662 - DNA, 36 bp, Artificial Sequence
  Synthetic oligonucleotide
gcgcgctaacgactgtaggaatccaattctgaccga

SEQ ID NO: 663 - DNA, 38 bp, Artificial Sequence
  Synthetic oligonucleotide
agtgactgcgggcactgcgatcgcttttgattatttga

SEQ ID NO: 664 - DNA, 36 bp, Artificial Sequence
  Synthetic oligonucleotide
agccacccatcctcaaccgtgccataatcgcctcta

SEQ ID NO: 665 - DNA, 35 bp, Artificial Sequence
  Synthetic oligonucleotide
gcctctaccgtgcctgtgacccaccagttttttat

SEQ ID NO: 666 - DNA, 35 bp, Artificial Sequence
  Synthetic oligonucleotide
tcgtagtacgcaggtggtcaagcacgatttcttta

SEQ ID NO: 667 - DNA, 38 bp, Artificial Sequence
  Synthetic oligonucleotide
tcagtacgcactagtacattgccaagctttccacatga

SEQ ID NO: 668 - DNA, 35 bp, Artificial Sequence
  Synthetic oligonucleotide
aagcggaactagccaaggcaagggaaatgccctca

SEQ ID NO: 669 - DNA, 35 bp, Artificial Sequence
  Synthetic oligonucleotide
ggaccgaatctaggctgtactgtgcacgcatcgcc

SEQ ID NO: 670 - DNA, 35 bp, Artificial Sequence
  Synthetic oligonucleotide
ttacctacctggtcaggcataacatttagttcctc

SEQ ID NO: 671 - DNA, 38 bp, Artificial Sequence
  Synthetic oligonucleotide
aagaccgcgtgccaggtcaacgtacgcacatgcaatga

SEQ ID NO: 672 - DNA, 38 bp, Artificial Sequence
  Synthetic oligonucleotide
atcgtagtactgtagggcctctgtttcactcaatatga

SEQ ID NO: 673 - DNA, 35 bp, Artificial Sequence
  Synthetic oligonucleotide
aggacaggcgggttttgctgacgttgtctatactg

SEQ ID NO: 674 - DNA, 35 bp, Artificial Sequence
  Synthetic oligonucleotide
tactccactgtgcatccgatcttcttccccaactc

SEQ ID NO: 675 - DNA, 37 bp, Artificial Sequence
  Synthetic oligonucleotide
tctccactgtgcccgtaacttttcttttactgtccga

SEQ ID NO: 676 - DNA, 36 bp, Artificial Sequence
  Synthetic oligonucleotide
ccgggcctaggaggactgcatgacccctttaaccaa

SEQ ID NO: 677 - DNA, 35 bp, Artificial Sequence
  Synthetic oligonucleotide
ccgggcctaggacggttccacagtcagcgaatcct

SEQ ID NO: 678 - DNA, 35 bp, Artificial Sequence
  Synthetic oligonucleotide
aacgcgcgcttgggatgtatgcatcatctagattt

SEQ ID NO: 679 - DNA, 35 bp, Artificial Sequence
  Synthetic oligonucleotide
cacgacgcaccttaccgctttctatttttccgctt

SEQ ID NO: 680 - DNA, 35 bp, Artificial Sequence
  Synthetic oligonucleotide
gcacttggccgctttaactactacgctttgtcctc

SEQ ID NO: 681 - DNA, 37 bp, Artificial Sequence
  Synthetic oligonucleotide
cgtgtacgccagtgccgtgcagtcaggcgatctatga

SEQ ID NO: 682 - DNA, 36 bp, Artificial Sequence
  Synthetic oligonucleotide
cttaggcaatgacgtgcccttatgcgacttcgccca

SEQ ID NO: 683 - DNA, 38 bp, Artificial Sequence
  Synthetic oligonucleotide
gcaccgtttccaccgcgcgtggatcttcccaactttga

SEQ ID NO: 684 - DNA, 35 bp, Artificial Sequence
  Synthetic oligonucleotide
gcggacctagcttacggactgtaattaacgttttt

SEQ ID NO: 685 - DNA, 38 bp, Artificial Sequence
  Synthetic oligonucleotide
atgcgcatcccctctaccgtgcaattttccatccctga

SEQ ID NO: 686 - DNA, 36 bp, Artificial Sequence
  Synthetic oligonucleotide
gacgcgcgccagacagggaactgcacaggcatgcca

SEQ ID NO: 687 - DNA, 35 bp, Artificial Sequence
  Synthetic oligonucleotide
ccgagactaggacccctgtgttcatgcgctatttc

SEQ ID NO: 688 - DNA, 35 bp, Artificial Sequence
  Synthetic oligonucleotide
gctaactgcaggcacagcctaagaaacctcatgta

SEQ ID NO: 689 - DNA, 38 bp, Artificial Sequence
  Synthetic oligonucleotide
tgcagtctagcccgcttaatgtattccttgattcttga

SEQ ID NO: 690 - DNA, 35 bp, Artificial Sequence
  Synthetic oligonucleotide
gcgtgctagcgtactgcatggatactttggtagct

SEQ ID NO: 691 - DNA, 38 bp, Artificial Sequence
  Synthetic oligonucleotide
tcgtagtacagcagaccctccctacctacaattggtga

SEQ ID NO: 692 - DNA, 35 bp, Artificial Sequence
  Synthetic oligonucleotide
gccgctgactgagttctctctactgtgcgtatttt

SEQ ID NO: 693 - DNA, 36 bp, Artificial Sequence
  Synthetic oligonucleotide
gccagcagccctgaactcctctgaagcatcgccgca

SEQ ID NO: 694 - DNA, 35 bp, Artificial Sequence
  Synthetic oligonucleotide
taggtctgcacatgcgctaggcttttcttaccctg

SEQ ID NO: 695 - DNA, 38 bp, Artificial Sequence
  Synthetic oligonucleotide
gcgacgccccacgctttgacctaaacccatcaatatga

SEQ ID NO: 696 - DNA, 38 bp, Artificial Sequence
  Synthetic oligonucleotide
cgctacagacatgcgcatcttgacttatattcaattga

SEQ ID NO: 697 - DNA, 35 bp, Artificial Sequence
  Synthetic oligonucleotide
atgcactactgcgagcgagcacaggtttcctcctt

SEQ ID NO: 698 - DNA, 38 bp, Artificial Sequence
  Synthetic oligonucleotide
aacgcgtgccagagaagaaccgcggtctcgccccatga

SEQ ID NO: 699 - DNA, 35 bp, Artificial Sequence
  Synthetic oligonucleotide
cattgcgaactagctttcttctccttctagctttt

SEQ ID NO: 700 - DNA, 35 bp, Artificial Sequence
  Synthetic oligonucleotide
catgccctagaacattgctttaacactttcgcttt

SEQ ID NO: 701 - DNA, 38 bp, Artificial Sequence
  Synthetic oligonucleotide
tcatgcgatcaatcgctctgcgtgcctagatcgattga

SEQ ID NO: 702 - DNA, 34 bp, Artificial Sequence
  Synthetic oligonucleotide
gcgaccgtggcttcctacctccaagctttccgac

SEQ ID NO: 703 - DNA, 36 bp, Artificial Sequence
  Synthetic oligonucleotide
gcgtgctaacgtactagaccaaagcgagtaacatca

SEQ ID NO: 704 - DNA, 37 bp, Artificial Sequence
  Synthetic oligonucleotide
tcacgcgcgcttgggattacgtacaatcatcaatgga

SEQ ID NO: 705 - DNA, 36 bp, Artificial Sequence
  Synthetic oligonucleotide
gcactacaccctattcccgcgtaggtccccgagcct

SEQ ID NO: 706 - DNA, 36 bp, Artificial Sequence
  Synthetic oligonucleotide
taactccactgtgcgatcattgtttttcttttttga

SEQ ID NO: 707 - DNA, 35 bp, Artificial Sequence
  Synthetic oligonucleotide
atcgtagtactggtactcctgccctatttcgataa

SEQ ID NO: 708 - DNA, 35 bp, Artificial Sequence
  Synthetic oligonucleotide
acactctgcagcctagaactctaccgtgctaattt

SEQ ID NO: 709 - DNA, 35 bp, Artificial Sequence
  Synthetic oligonucleotide
gtgcgcgcgctagcatgcgtaatcatgtcatttaa

SEQ ID NO: 710 - DNA, 35 bp, Artificial Sequence
  Synthetic oligonucleotide
tcaatctcaactgtgcttccctggtttttagtttc

SEQ ID NO: 711 - DNA, 38 bp, Artificial Sequence
  Synthetic oligonucleotide
gtcctgcgtgctaaggaccctaagcttcatgcgtatga

SEQ ID NO: 712 - DNA, 36 bp, Artificial Sequence
  Synthetic oligonucleotide
tcgccgcccaaggatccctctactgtgccactttaa

SEQ ID NO: 713 - DNA, 35 bp, Artificial Sequence
  Synthetic oligonucleotide
gcgtgcctacgtaacgttcatgcggatggaccgat

SEQ ID NO: 714 - DNA, 35 bp, Artificial Sequence
  Synthetic oligonucleotide
cgtgccttggccggaccagtccttttgatcactac

SEQ ID NO: 715 - DNA, 35 bp, Artificial Sequence
  Synthetic oligonucleotide
caggcatgacgatttggcttaacttcccttgctta

SEQ ID NO: 716 - DNA, 35 bp, Artificial Sequence
  Synthetic oligonucleotide
tatgcgtatccaatcgcttttcaattcctatgctt

SEQ ID NO: 717 - DNA, 35 bp, Artificial Sequence
  Synthetic oligonucleotide
ccgcgtgccaggcgtaatgtaggcaggccctttat

SEQ ID NO: 718 - DNA, 35 bp, Artificial Sequence
  Synthetic oligonucleotide
gctaacagcagtcattgaatcctgtacgctccaaa

SEQ ID NO: 719 - DNA, 35 bp, Artificial Sequence
  Synthetic oligonucleotide
atcgcctgcgccaggactggggtgcagatcatgcg

SEQ ID NO: 720 - DNA, 37 bp, Artificial Sequence
  Synthetic oligonucleotide
ctgagcagtcaccattctttatctctactgtgctcga

SEQ ID NO: 721 - DNA, 35 bp, Artificial Sequence
  Synthetic oligonucleotide
acccacatcctgcgtgctaaggacggtggggccgg

SEQ ID NO: 722 - DNA, 36 bp, Artificial Sequence
  Synthetic oligonucleotide
ccggacctaggaatcgactcaggcgtggtagaacaa

SEQ ID NO: 723 - DNA, 35 bp, Artificial Sequence
  Synthetic oligonucleotide
tcatggccactaaactcgccccataaaaccttgtc

SEQ ID NO: 724 - DNA, 35 bp, Artificial Sequence
  Synthetic oligonucleotide
gactctactgtgcccgtttgttgttcttcccgaac

SEQ ID NO: 725 - DNA, 36 bp, Artificial Sequence
  Synthetic oligonucleotide
ggagccgggcctgccacgtagctcggaaaatgcgga

SEQ ID NO: 726 - DNA, 37 bp, Artificial Sequence
  Synthetic oligonucleotide
gatttcactagctctctactgtgcccatttctgttga

SEQ ID NO: 727 - DNA, 35 bp, Artificial Sequence
  Synthetic oligonucleotide
agcggatctagccagtatgcactcatgtcactttt

SEQ ID NO: 728 - DNA, 35 bp, Artificial Sequence
  Synthetic oligonucleotide
actgcacgtgcgcgcttaagttttcgcttctcttt

SEQ ID NO: 729 - DNA, 38 bp, Artificial Sequence
  Synthetic oligonucleotide
gtcgaggggaactcctctgaggctcaacacatatctga

SEQ ID NO: 730 - DNA, 35 bp, Artificial Sequence
  Synthetic oligonucleotide
gcgatccggttaaactacacactctactgtgcgaa

SEQ ID NO: 731 - DNA, 35 bp, Artificial Sequence
  Synthetic oligonucleotide
gctaaccaaggaatgcgctgccttagacagaattg

SEQ ID NO: 732 - DNA, 35 bp, Artificial Sequence
  Synthetic oligonucleotide
tcacctaccagggcgtggtaggtttttctctctac

SEQ ID NO: 733 - DNA, 37 bp, Artificial Sequence
  Synthetic oligonucleotide
cctcgcgtgccagggacctagtgcaatctatccgaga

SEQ ID NO: 734 - DNA, 38 bp, Artificial Sequence
  Synthetic oligonucleotide
ccgagcgaacgtacggaaagtgcgtactttatctttga

SEQ ID NO: 735 - DNA, 36 bp, Artificial Sequence
  Synthetic oligonucleotide
agtacgtgaccactactttccctcctttgtacttga

SEQ ID NO: 736 - DNA, 38 bp, Artificial Sequence
  Synthetic oligonucleotide
tcatgcggttgattggtctactcatgtttcttaattga

SEQ ID NO: 737 - DNA, 36 bp, Artificial Sequence
  Synthetic oligonucleotide
gcacaatcccacgcttcctattataccacgattcta

SEQ ID NO: 738 - DNA, 35 bp, Artificial Sequence
  Synthetic oligonucleotide
acaacccggcgcgccacggggtgatcgacaactgt

SEQ ID NO: 739 - DNA, 35 bp, Artificial Sequence
  Synthetic oligonucleotide
gatcgtccgcgtgcctggcaacgatacccgacaag

SEQ ID NO: 740 - DNA, 35 bp, Artificial Sequence
  Synthetic oligonucleotide
gcgtgtctctctactgtgcgcctcattcttatata

SEQ ID NO: 741 - DNA, 35 bp, Artificial Sequence
  Synthetic oligonucleotide
tcgtagtacacgcagtcgacaaacaagctagtatt

SEQ ID NO: 742 - DNA, 36 bp, Artificial Sequence
  Synthetic oligonucleotide
ttacctaccaacgtaatgcgctacaaccagagagta

SEQ ID NO: 743 - DNA, 35 bp, Artificial Sequence
  Synthetic oligonucleotide
ttagcgaaactagcgtacgacaaggtccaatgtaa

SEQ ID NO: 744 - DNA, 36 bp, Artificial Sequence
  Synthetic oligonucleotide
tgggcggatctagcaaaaacggacgcctcctgcgaa

SEQ ID NO: 745 - DNA, 35 bp, Artificial Sequence
  Synthetic oligonucleotide
aagcacgggacgcatgtcgtggctacctgaattct

SEQ ID NO: 746 - DNA, 38 bp, Artificial Sequence
  Synthetic oligonucleotide
gtgtgcaggcatgacgataagctttctaactcctatga

SEQ ID NO: 747 - DNA, 35 bp, Artificial Sequence
  Synthetic oligonucleotide
tctgcgcgcctagaagtacgcaatcaccacgcgac

SEQ ID NO: 748 - DNA, 38 bp, Artificial Sequence
  Synthetic oligonucleotide
atgtcgctgcaggtgcgtgcaagctttaatctccttga

SEQ ID NO: 749 - DNA, 37 bp, Artificial Sequence
  Synthetic oligonucleotide
tccgggcctaggaacggtcactagggaatgcccctga

SEQ ID NO: 750 - DNA, 36 bp, Artificial Sequence
  Synthetic oligonucleotide
acgtagtgcacatcctagactccactgtgcctctta

SEQ ID NO: 751 - DNA, 35 bp, Artificial Sequence
  Synthetic oligonucleotide
tcatgcataggcttatatgacaccatcgcttcttt

SEQ ID NO: 752 - DNA, 36 bp, Artificial Sequence
  Synthetic oligonucleotide
actgccggctgcaagcttttaggtacacttgattca

SEQ ID NO: 753 - DNA, 38 bp, Artificial Sequence
  Synthetic oligonucleotide
cacgcgccgctttttcgcctatacgctttttattttga

SEQ ID NO: 754 - DNA, 37 bp, Artificial Sequence
  Synthetic oligonucleotide
tctgactgcacgcatgggaccgcttaccactaaccga

SEQ ID NO: 755 - DNA, 36 bp, Artificial Sequence
  Synthetic oligonucleotide
tgcgggactagcataagttccacatgcgaagacaaa

SEQ ID NO: 756 - DNA, 35 bp, Artificial Sequence
  Synthetic oligonucleotide
gcgtgcctacgtacaggcggatatgcgcgtttccc

SEQ ID NO: 757 - DNA, 38 bp, Artificial Sequence
  Synthetic oligonucleotide
gcagtcgcgtatcgattcgctttcttatctggttatga

SEQ ID NO: 758 - DNA, 38 bp, Artificial Sequence
  Synthetic oligonucleotide
cgcaggcatgcaggcttttagtttaattactcctttga

SEQ ID NO: 759 - DNA, 36 bp, Artificial Sequence
  Synthetic oligonucleotide
gacactccagcactaaagctagtgtggtatcactta

SEQ ID NO: 760 - DNA, 38 bp, Artificial Sequence
  Synthetic oligonucleotide
cactgcgcttctagtactacctccactgtgctttttga

SEQ ID NO: 761 - DNA, 35 bp, Artificial Sequence
  Synthetic oligonucleotide
acacatgccgcttaatattgattcgcttttatcat

SEQ ID NO: 762 - DNA, 35 bp, Artificial Sequence
  Synthetic oligonucleotide
gagtagccaaacgcgtgcttggtggcgatcacgta

SEQ ID NO: 763 - DNA, 35 bp, Artificial Sequence
  Synthetic oligonucleotide
tactaaggaaagcggtaaaacgtacactgaaatct

SEQ ID NO: 764 - DNA, 35 bp, Artificial Sequence
  Synthetic oligonucleotide
ggtggtgcgaaaaatgcggtgtgaactcccctgaa

SEQ ID NO: 765 - DNA, 35 bp, Artificial Sequence
  Synthetic oligonucleotide
tatcgcgagccaggagacgtaaaaaggaaatgcgg

SEQ ID NO: 766 - DNA, 35 bp, Artificial Sequence
  Synthetic oligonucleotide
ggccaccgaccactatgcatcgtgtcatgacgtaa

SEQ ID NO: 767 - DNA, 36 bp, Artificial Sequence
  Synthetic oligonucleotide
atccgatctctaccgtgcaacccacccctttgttta

SEQ ID NO: 768 - DNA, 37 bp, Artificial Sequence
  Synthetic oligonucleotide
gcggtcgatcctctcaactgtgcactttttactacga

SEQ ID NO: 769 - DNA, 37 bp, Artificial Sequence
  Synthetic oligonucleotide
attcgtagctcaactctactgtgcattttttgtttga

SEQ ID NO: 770 - DNA, 37 bp, Artificial Sequence
  Synthetic oligonucleotide
gccgctaaactgtctccactgtgctaccttatcttga

SEQ ID NO: 771 - DNA, 35 bp, Artificial Sequence
  Synthetic oligonucleotide
cgcgtgcttgcgtactgtccgcgtaatcacacaca

SEQ ID NO: 772 - DNA, 36 bp, Artificial Sequence
  Synthetic oligonucleotide
tctccactgtgccgtttcctccgttcttactcctaa

SEQ ID NO: 773 - DNA, 35 bp, Artificial Sequence
  Synthetic oligonucleotide
acctgcgtgctaaggaacgtagcattcgtgtgcga

SEQ ID NO: 774 - DNA, 35 bp, Artificial Sequence
  Synthetic oligonucleotide
acacgcgcgcttgggactgaactcagcaatgcacc

SEQ ID NO: 775 - DNA, 35 bp, Artificial Sequence
  Synthetic oligonucleotide
tcacctactaacgtgtgcggggtttttacatcact

SEQ ID NO: 776 - DNA, 36 bp, Artificial Sequence
  Synthetic oligonucleotide
gatagccgcttagccaacacaaccgcttttgattca

SEQ ID NO: 777 - DNA, 35 bp, Artificial Sequence
  Synthetic oligonucleotide
gcggccttgcatcgattcaactcgccctatttcaa

SEQ ID NO: 778 - DNA, 35 bp, Artificial Sequence
  Synthetic oligonucleotide
agcgcatcgtagccgtacagcaatgtaatattctc

SEQ ID NO: 779 - DNA, 35 bp, Artificial Sequence
  Synthetic oligonucleotide
gctaactgcaggccaccacgcttgccctggctacc

SEQ ID NO: 780 - DNA, 35 bp, Artificial Sequence
  Synthetic oligonucleotide
aagcactgtgccgcagatatgcgatttttgtgatt

SEQ ID NO: 781 - DNA, 38 bp, Artificial Sequence
  Synthetic oligonucleotide
tgagccgcgcgcctggccacgacgattcatgtgattga

SEQ ID NO: 782 - DNA, 37 bp, Artificial Sequence
  Synthetic oligonucleotide
catgcgtaagcttatgtttcgattacgttcccattga

SEQ ID NO: 783 - DNA, 35 bp, Artificial Sequence
  Synthetic oligonucleotide
gtggtccgcgcgaaccaccatgggtgcaggcgaat

SEQ ID NO: 784 - DNA, 35 bp, Artificial Sequence
  Synthetic oligonucleotide
tcacctaccagggaaatgtccagccaccccgagct

SEQ ID NO: 785 - DNA, 35 bp, Artificial Sequence
  Synthetic oligonucleotide
gcagggcttgcaggcttttaattgtttcactatcg

SEQ ID NO: 786 - DNA, 36 bp, Artificial Sequence
  Synthetic oligonucleotide
gctaagtgcggtcactgccccaggagcttgatgcta

SEQ ID NO: 787 - DNA, 35 bp, Artificial Sequence
  Synthetic oligonucleotide
gtgcgggactagcacgcagtacagctttctgcgtc

SEQ ID NO: 788 - DNA, 35 bp, Artificial Sequence
  Synthetic oligonucleotide
gcgggactagcgagtttagcctgatactacattga

SEQ ID NO: 789 - DNA, 37 bp, Artificial Sequence
  Synthetic oligonucleotide
gcggacgattcctgttcctttgcttatttctctgaga

SEQ ID NO: 790 - DNA, 35 bp, Artificial Sequence
  Synthetic oligonucleotide
acacggacctagggtcgtactgcaggaagttgttc

SEQ ID NO: 791 - DNA, 37 bp, Artificial Sequence
  Synthetic oligonucleotide
actccactgtgcctctttaacttctttccatatatga

SEQ ID NO: 792 - DNA, 35 bp, Artificial Sequence
  Synthetic oligonucleotide
gcgtgcctacgacgccaggcactagtttagtaaac

SEQ ID NO: 793 - DNA, 38 bp, Artificial Sequence
  Synthetic oligonucleotide
aagcggggagcaacgtactgccatttactattccatga

SEQ ID NO: 794 - DNA, 35 bp, Artificial Sequence
  Synthetic oligonucleotide
tttaacggaacgacctgtggctgcacgtttctcca

SEQ ID NO: 795 - DNA, 35 bp, Artificial Sequence
  Synthetic oligonucleotide
tttgtactgagcaagcgtacataccgaagccccgt

SEQ ID NO: 796 - DNA, 35 bp, Artificial Sequence
  Synthetic oligonucleotide
catgcgcgattagcttgttctaccaccgctttaca

SEQ ID NO: 797 - DNA, 38 bp, Artificial Sequence
  Synthetic oligonucleotide
catgtcgacctctttgtaaactcgccctattttcctga

SEQ ID NO: 798 - DNA, 35 bp, Artificial Sequence
  Synthetic oligonucleotide
cattgcgcgctttcaataacctccgcttataacac

SEQ ID NO: 799 - DNA, 35 bp, Artificial Sequence
  Synthetic oligonucleotide
catctagaggctcattcatattaacacgctttcct

SEQ ID NO: 800 - DNA, 37 bp, Artificial Sequence
  Synthetic oligonucleotide
tcgtagtgctgcaagtccttagtaccttggatcttga

SEQ ID NO: 801 - DNA, 35 bp, Artificial Sequence
  Synthetic oligonucleotide
atgcacggttctgctcaggccatcattttcttcac

SEQ ID NO: 802 - DNA, 35 bp, Artificial Sequence
  Synthetic oligonucleotide
gcgcgcctacgttaatgcacttcgtgacatcttcc

SEQ ID NO: 803 - DNA, 35 bp, Artificial Sequence
  Synthetic oligonucleotide
ccggtcgtagggtgactgcgggcataagctgggtt

SEQ ID NO: 804 - DNA, 35 bp, Artificial Sequence
  Synthetic oligonucleotide
tgcgcaggcccgttgtactcgctcactgctagatt

SEQ ID NO: 805 - DNA, 36 bp, Artificial Sequence
  Synthetic oligonucleotide
aagcacggacaagcatgtatgcgatcacgcccttta

SEQ ID NO: 806 - DNA, 35 bp, Artificial Sequence
  Synthetic oligonucleotide
gactgcgggactagcaacgtactgtggctggcgat

SEQ ID NO: 807 - DNA, 35 bp, Artificial Sequence
  Synthetic oligonucleotide
gcctccgtaacctacccgcgtgcctgggggttacc

SEQ ID NO: 808 - DNA, 35 bp, Artificial Sequence
  Synthetic oligonucleotide
gcagggaatccagcgaccgttcctctaccgtgcct

SEQ ID NO: 809 - DNA, 38 bp, Artificial Sequence
  Synthetic oligonucleotide
catgcggaagctttctctgttgatgatgaaccctttga

SEQ ID NO: 810 - DNA, 35 bp, Artificial Sequence
  Synthetic oligonucleotide
actgcgctaatgcccgcttaacctccatgattgtt

SEQ ID NO: 811 - DNA, 35 bp, Artificial Sequence
  Synthetic oligonucleotide
ggggtcgcgtgccagaccacgactcatgtctgtgc

SEQ ID NO: 812 - DNA, 35 bp, Artificial Sequence
  Synthetic oligonucleotide
atcgtagaactgcagacccgcatggctacctttgt

SEQ ID NO: 813 - DNA, 36 bp, Artificial Sequence
  Synthetic oligonucleotide
attgcggatcgtagctctaactgcgcatgcggtaca

SEQ ID NO: 814 - DNA, 35 bp, Artificial Sequence
  Synthetic oligonucleotide
tacacaccgctttactatcctcaatttcgctttcc

SEQ ID NO: 815 - DNA, 35 bp, Artificial Sequence
  Synthetic oligonucleotide
tgcctctactgtgccgataccggtttctttatatt

SEQ ID NO: 816 - DNA, 36 bp, Artificial Sequence
  Synthetic oligonucleotide
tcccgcgcgctagggtaatgatccagcagacatgta

SEQ ID NO: 817 - DNA, 36 bp, Artificial Sequence
  Synthetic oligonucleotide
tcgtagtactcgcgcttcccgtatcacaattttgaa

SEQ ID NO: 818 - DNA, 37 bp, Artificial Sequence
  Synthetic oligonucleotide
aggtcgcgcgccagggacgtgctgcagaaccacctga

SEQ ID NO: 819 - DNA, 36 bp, Artificial Sequence
  Synthetic oligonucleotide
tctaccgcgcgcttggaggaacgttccggactggca

SEQ ID NO: 820 - DNA, 35 bp, Artificial Sequence
  Synthetic oligonucleotide
gcaaaataataccgctacattctctacaactcgcc

SEQ ID NO: 821 - DNA, 36 bp, Artificial Sequence
  Synthetic oligonucleotide
gcgtggggtgcgcgctaaccacacttgaccagacta

SEQ ID NO: 822 - DNA, 35 bp, Artificial Sequence
  Synthetic oligonucleotide
cccggcgagccacgggctgtacgagcaagtcacac

SEQ ID NO: 823 - DNA, 36 bp, Artificial Sequence
  Synthetic oligonucleotide
gcgaggaccatcccgcgtgcctgggagtcactttaa

SEQ ID NO: 824 - DNA, 38 bp, Artificial Sequence
  Synthetic oligonucleotide
atgcacggatgcggctagcgatctcccctaaacactga

SEQ ID NO: 825 - DNA, 37 bp, Artificial Sequence
  Synthetic oligonucleotide
atgcactgtacgtagagtaatgcggttcattccttga

SEQ ID NO: 826 - DNA, 35 bp, Artificial Sequence
  Synthetic oligonucleotide
gatcgtaacgctgcaaggtcactccgggaaaacca

SEQ ID NO: 827 - DNA, 38 bp, Artificial Sequence
  Synthetic oligonucleotide
cctgcgcgctaggggagatactggttcgtgcgatttga

SEQ ID NO: 828 - DNA, 35 bp, Artificial Sequence
  Synthetic oligonucleotide
acgcgtgctaggacggactgaacggtaaaactaag

SEQ ID NO: 829 - DNA, 38 bp, Artificial Sequence
  Synthetic oligonucleotide
actgcagagtatgcaagcttgaccaccatacgctttga

SEQ ID NO: 830 - DNA, 37 bp, Artificial Sequence
  Synthetic oligonucleotide
catgcgcaggctttctctttagttctcttctggttga

SEQ ID NO: 831 - DNA, 35 bp, Artificial Sequence
  Synthetic oligonucleotide
tcaagcgaatctagcggtacacctcgcaggctcgc

SEQ ID NO: 832 - DNA, 35 bp, Artificial Sequence
  Synthetic oligonucleotide
catgcaagcttcgttcaacatccaacctagctgta

SEQ ID NO: 833 - DNA, 35 bp, Artificial Sequence
  Synthetic oligonucleotide
gcgtgccaacgttgcatcaactattttcatgaatt

SEQ ID NO: 834 - DNA, 38 bp, Artificial Sequence
  Synthetic oligonucleotide
gcgtgctgtgactccaccgtgccttatactttgaatga

SEQ ID NO: 835 - DNA, 36 bp, Artificial Sequence
  Synthetic oligonucleotide
catgcgcaagcttcaacgacacaactaaacctgcta

SEQ ID NO: 836 - DNA, 36 bp, Artificial Sequence
  Synthetic oligonucleotide
ggctgaccacgatgaagtttgcgcaagcttttatta

SEQ ID NO: 837 - DNA, 37 bp, Artificial Sequence
  Synthetic oligonucleotide
aacgcgagcctgtacggtactgcccctatcccaccga

SEQ ID NO: 838 - DNA, 35 bp, Artificial Sequence
  Synthetic oligonucleotide
gcgggcctacgactgcaggacccctgacccattct

SEQ ID NO: 839 - DNA, 36 bp, Artificial Sequence
  Synthetic oligonucleotide
gctaactgcgtgtcatttcggtttcctacatccata

SEQ ID NO: 840 - DNA, 36 bp, Artificial Sequence
  Synthetic oligonucleotide
ccggatctaggagagtactggctgcacatgcgacaa

SEQ ID NO: 841 - DNA, 36 bp, Artificial Sequence
  Synthetic oligonucleotide
tacgcgcgactaacattaatgcggtcttatcatcca

SEQ ID NO: 842 - DNA, 38 bp, Artificial Sequence
  Synthetic oligonucleotide
cgccgcgccagggtactgcaggaagcgctacgacttga

SEQ ID NO: 843 - DNA, 35 bp, Artificial Sequence
  Synthetic oligonucleotide
gcagtcagcaacgcttctttatgtcatacccgctt

SEQ ID NO: 844 - DNA, 35 bp, Artificial Sequence
  Synthetic oligonucleotide
catgcgaaagcttctcatacttgatcacgtttccc

SEQ ID NO: 845 - DNA, 36 bp, Artificial Sequence
  Synthetic oligonucleotide
cacgcggttcgtagcggaatgtactggtcaatccta

SEQ ID NO: 846 - DNA, 36 bp, Artificial Sequence
  Synthetic oligonucleotide
ccggggctaggaacgggggcagtcagagcgaccata

SEQ ID NO: 847 - DNA, 35 bp, Artificial Sequence
  Synthetic oligonucleotide
ccggcagtcttatctctactgtgccttctttaatc

SEQ ID NO: 848 - DNA, 38 bp, Artificial Sequence
  Synthetic oligonucleotide
gagttgcgagcatgcggacgcttttgttttgcttttga

SEQ ID NO: 849 - DNA, 38 bp, Artificial Sequence
  Synthetic oligonucleotide
tacgcaggagggccatgacgctgactatacgcttttga

SEQ ID NO: 850 - DNA, 38 bp, Artificial Sequence
  Synthetic oligonucleotide
ttctgcgcaatttcaaccctctactgtgcccaatttga

SEQ ID NO: 851 - DNA, 35 bp, Artificial Sequence
  Synthetic oligonucleotide
tcataccctcatgatcatgcagtcaccactcttag

SEQ ID NO: 852 - DNA, 38 bp, Artificial Sequence
  Synthetic oligonucleotide
gcggagctagcacggtactgcgcataaactatgattga

SEQ ID NO: 853 - DNA, 35 bp, Artificial Sequence
  Synthetic oligonucleotide
gaccggaactaggtacggctgcagagcgcaaccgc

SEQ ID NO: 854 - DNA, 38 bp, Artificial Sequence
  Synthetic oligonucleotide
tcgtagtcaccgcgggtcatccactattaacaccttga

SEQ ID NO: 855 - DNA, 35 bp, Artificial Sequence
  Synthetic oligonucleotide
acgcgacagctacgagtccccgcggagtgcaacgc

SEQ ID NO: 856 - DNA, 36 bp, Artificial Sequence
  Synthetic oligonucleotide
tcacctactagggaaggccacacggcacgcacatta

SEQ ID NO: 857 - DNA, 37 bp, Artificial Sequence
  Synthetic oligonucleotide
aaccggaactaggtgtgggacctgaaggcatggacga

SEQ ID NO: 858 - DNA, 37 bp, Artificial Sequence
  Synthetic oligonucleotide
gtaaactgcgctcttcttcgccctcccctgtctcgga

SEQ ID NO: 859 - DNA, 35 bp, Artificial Sequence
  Synthetic oligonucleotide
tcccatcgccggacgctccatatctttcggatcct

SEQ ID NO: 860 - DNA, 36 bp, Artificial Sequence
  Synthetic oligonucleotide
tgcctctaccgtgccgtgttgattttctccattcta

SEQ ID NO: 861 - DNA, 38 bp, Artificial Sequence
  Synthetic oligonucleotide
gcgggccgtgactgtttaccactctactgtgcgattga

SEQ ID NO: 862 - DNA, 35 bp, Artificial Sequence
  Synthetic oligonucleotide
gcgatccatgacgaccaatatataccgctttgaca

SEQ ID NO: 863 - DNA, 36 bp, Artificial Sequence
  Synthetic oligonucleotide
tgtactctctactgtgcccttcctgagtgtttatca

SEQ ID NO: 864 - DNA, 36 bp, Artificial Sequence
  Synthetic oligonucleotide
taaggcgaaactagctgaaggtactgcgaattttta

SEQ ID NO: 865 - DNA, 37 bp, Artificial Sequence
  Synthetic oligonucleotide
atgcacggtacggaaggattctgccttcccatcacga

SEQ ID NO: 866 - DNA, 36 bp, Artificial Sequence
  Synthetic oligonucleotide
ggtcgcgtgccaggcacggagatgcggtcctttgca

SEQ ID NO: 867 - DNA, 35 bp, Artificial Sequence
  Synthetic oligonucleotide
aacctgaaggaaccgcatctctaccgtgcctatat

SEQ ID NO: 868 - DNA, 35 bp, Artificial Sequence
  Synthetic oligonucleotide
catgcaggctttccaacccactttaatagctaact

SEQ ID NO: 869 - DNA, 36 bp, Artificial Sequence
  Synthetic oligonucleotide
tcatgccaggctttttctttgaattccgatttaata

SEQ ID NO: 870 - DNA, 36 bp, Artificial Sequence
  Synthetic oligonucleotide
gcgttagatctctaccgtgctcaacctcttctgtaa

SEQ ID NO: 871 - DNA, 36 bp, Artificial Sequence
  Synthetic oligonucleotide
gtgacgccgctatctttacaactctactgtgcttta

SEQ ID NO: 872 - DNA, 36 bp, Artificial Sequence
  Synthetic oligonucleotide
tattgcgaactcctctgagctacggtacgtgtggca

SEQ ID NO: 873 - DNA, 35 bp, Artificial Sequence
  Synthetic oligonucleotide
tctatcaactcgccccaaattacccgccccacata

SEQ ID NO: 874 - DNA, 35 bp, Artificial Sequence
  Synthetic oligonucleotide
catgtctaggtctttcgtaatcctctaccgtgcca

SEQ ID NO: 875 - DNA, 36 bp, Artificial Sequence
  Synthetic oligonucleotide
ctgcggtcagtgcccatccgctcccaactagcctta

SEQ ID NO: 876 - DNA, 38 bp, Artificial Sequence
  Synthetic oligonucleotide
ccactccaccgtgcccttctataggttttctcaactga

SEQ ID NO: 877 - DNA, 35 bp, Artificial Sequence
  Synthetic oligonucleotide
gccttcccacgtcgagtcagttcgacgtccccgtt

SEQ ID NO: 878 - DNA, 38 bp, Artificial Sequence
  Synthetic oligonucleotide
tcatccttttactcgaccgtgccccccttagttcctga

SEQ ID NO: 879 - DNA, 36 bp, Artificial Sequence
  Synthetic oligonucleotide
taaaggccacgcatcccccgttaaaacatcattaaa

SEQ ID NO: 880 - DNA, 36 bp, Artificial Sequence
  Synthetic oligonucleotide
ttcttctccactgtgccccaactcaatttttgatta

SEQ ID NO: 881 - DNA, 36 bp, Artificial Sequence
  Synthetic oligonucleotide
tctccaccgtgccatcgaaaatttactctctgctca

SEQ ID NO: 882 - DNA, 38 bp, Artificial Sequence
  Synthetic oligonucleotide
taacctactaaggcatgtcgactctatcatatgcttga

SEQ ID NO: 883 - DNA, 36 bp, Artificial Sequence
  Synthetic oligonucleotide
aaaggcatgacatatatcctctaccgtgcccgccta

SEQ ID NO: 884 - DNA, 36 bp, Artificial Sequence
  Synthetic oligonucleotide
catgccagatttcgcactagttacctccttagctta

SEQ ID NO: 885 - DNA, 38 bp, Artificial Sequence
  Synthetic oligonucleotide
catgccggagcgatttattcaatatcttctatgagtga

SEQ ID NO: 886 - DNA, 35 bp, Artificial Sequence
  Synthetic oligonucleotide
atcgtagtacaaaagggggttatctcttggtttcg

SEQ ID NO: 887 - DNA, 35 bp, Artificial Sequence
  Synthetic oligonucleotide
tagacatatcgttctggactttttctccactgtgc

SEQ ID NO: 888 - DNA, 37 bp, Artificial Sequence
  Synthetic oligonucleotide
atcgtagtactgtggtccgccactacccgaactatga

SEQ ID NO: 889 - DNA, 37 bp, Artificial Sequence
  Synthetic oligonucleotide
gaagagccccgcctgcttccttatccagatcatgcga

SEQ ID NO: 890 - DNA, 35 bp, Artificial Sequence
  Synthetic oligonucleotide
gcgcgatacgacatctccttagcttttgttttgct

SEQ ID NO: 891 - DNA, 35 bp, Artificial Sequence
  Synthetic oligonucleotide
gacgtcatggccaccctagcttcatttcttgcttt

SEQ ID NO: 892 - DNA, 38 bp, Artificial Sequence
  Synthetic oligonucleotide
ccggtcgtaggactaccgccaggcatattattgtttga

SEQ ID NO: 893 - DNA, 36 bp, Artificial Sequence
  Synthetic oligonucleotide
tgtggtagtacgcagtcagtcgctgtatcccgctaa

SEQ ID NO: 894 - DNA, 38 bp, Artificial Sequence
  Synthetic oligonucleotide
tatgcgcccctggtctatattcggaaaaccctacctga

SEQ ID NO: 895 - DNA, 35 bp, Artificial Sequence
  Synthetic oligonucleotide
ttaggtatcatgcggccacctggtctaatattttt

SEQ ID NO: 896 - DNA, 35 bp, Artificial Sequence
  Synthetic oligonucleotide
tcgtagtactcagggccccaccaaatttcttaaat

SEQ ID NO: 897 - DNA, 35 bp, Artificial Sequence
  Synthetic oligonucleotide
accgcgcgcctggtatcctgctatgtctagtccct

SEQ ID NO: 898 - DNA, 35 bp, Artificial Sequence
  Synthetic oligonucleotide
gatcgtagcgtacgtaggaaatccccgaaacaacg

SEQ ID NO: 899 - DNA, 37 bp, Artificial Sequence
  Synthetic oligonucleotide
cgtgccatggctttaaccgtatcttcgctttttctga

SEQ ID NO: 900 - DNA, 36 bp, Artificial Sequence
  Synthetic oligonucleotide
gcgatcgtagcacggtaaactggcccccttgcaata

SEQ ID NO: 901 - DNA, 36 bp, Artificial Sequence
  Synthetic oligonucleotide
acgcactgtataaagtctacgcgcccttcaaccata

SEQ ID NO: 902 - DNA, 38 bp, Artificial Sequence
  Synthetic oligonucleotide
cttacgcgtgcttggaacgatgtattgcggccaattga

SEQ ID NO: 903 - DNA, 36 bp, Artificial Sequence
  Synthetic oligonucleotide
tcgtaggactgcaaaccacacgccttgttcgaaaaa

SEQ ID NO: 904 - DNA, 35 bp, Artificial Sequence
  Synthetic oligonucleotide
ccgggtctaggacggctctgttgtctcctccctgt

SEQ ID NO: 905 - DNA, 35 bp, Artificial Sequence
  Synthetic oligonucleotide
atcgtagcactgcagggcgcctagtttacaatggg

SEQ ID NO: 906 - DNA, 35 bp, Artificial Sequence
  Synthetic oligonucleotide
gacgtcatcgtgccttcttggctgaccgtacagga

SEQ ID NO: 907 - DNA, 38 bp, Artificial Sequence
  Synthetic oligonucleotide
ttcatccgcgcgaatgaaaccgatctacatccctatga

SEQ ID NO: 908 - DNA, 35 bp, Artificial Sequence
  Synthetic oligonucleotide
atcgtagtaccataccccgcatgccgccaaaattt

SEQ ID NO: 909 - DNA, 37 bp, Artificial Sequence
  Synthetic oligonucleotide
aaacccgcgagcaggcattgaactcccctgaatacga

SEQ ID NO: 910 - DNA, 37 bp, Artificial Sequence
  Synthetic oligonucleotide
gcaatgacgtgcgttcgaccgattatctctactatga

SEQ ID NO: 911 - DNA, 36 bp, Artificial Sequence
  Synthetic oligonucleotide
aagcactgtacggaagtaggcccgcccccaaattaa

SEQ ID NO: 912 - DNA, 35 bp, Artificial Sequence
  Synthetic oligonucleotide
tcgtagtatctggaggtcgtgcgttgcactattac

SEQ ID NO: 913 - DNA, 36 bp, Artificial Sequence
  Synthetic oligonucleotide
gatcgtatacgtacgctaggtctctttcgcttatca

SEQ ID NO: 914 - DNA, 36 bp, Artificial Sequence
  Synthetic oligonucleotide
tgggcaaccggaactagtacagcccacgtacgttga

SEQ ID NO: 915 - DNA, 36 bp, Artificial Sequence
  Synthetic oligonucleotide
tcgcaaactcagcttcctctctaccgtgcatgttaa

SEQ ID NO: 916 - DNA, 38 bp, Artificial Sequence
  Synthetic oligonucleotide
gcgcgctaacaccctgcggtacaccaggaactccttga

SEQ ID NO: 917 - DNA, 35 bp, Artificial Sequence
  Synthetic oligonucleotide
ccggtcactgctggagtgcgaaagctttctcttgt

SEQ ID NO: 918 - DNA, 36 bp, Artificial Sequence
  Synthetic oligonucleotide
gcagaaggaaatgcgcgctaattgacaacgctcgaa

SEQ ID NO: 919 - DNA, 38 bp, Artificial Sequence
  Synthetic oligonucleotide
accgcgcgcctgggaccgtaatggatcctacataatga

SEQ ID NO: 920 - DNA, 36 bp, Artificial Sequence
  Synthetic oligonucleotide
gcgatcgtagctaagggatctactagggaatgccca

SEQ ID NO: 921 - DNA, 35 bp, Artificial Sequence
  Synthetic oligonucleotide
ttacctaccagggatgcggccccgaagccattctt

SEQ ID NO: 922 - DNA, 38 bp, Artificial Sequence
  Synthetic oligonucleotide
taggcaactaatgcagagacgcgacccacgacatttga

SEQ ID NO: 923 - DNA, 35 bp, Artificial Sequence
  Synthetic oligonucleotide
ctcctagcaggcgggccctgacaggcggtcgtagc

SEQ ID NO: 924 - DNA, 35 bp, Artificial Sequence
  Synthetic oligonucleotide
tcacctaccacggtcatctttacttgagacaacaa

SEQ ID NO: 925 - DNA, 35 bp, Artificial Sequence
  Synthetic oligonucleotide
taagcaactcctgccgtgccattaaagcttttata

SEQ ID NO: 926 - DNA, 36 bp, Artificial Sequence
  Synthetic oligonucleotide
taccgctgccatgaatcatctctgttaaactagcca

SEQ ID NO: 927 - DNA, 37 bp, Artificial Sequence
  Synthetic oligonucleotide
gagtacgcgacgccttggtctactactcttccctgga

SEQ ID NO: 928 - DNA, 35 bp, Artificial Sequence
  Synthetic oligonucleotide
gcggtcgtagcaacactgcatcctcatgatactta

SEQ ID NO: 929 - DNA, 35 bp, Artificial Sequence
  Synthetic oligonucleotide
tccgacggggcatcgtgtcaggcgcatgaaatttt

SEQ ID NO: 930 - DNA, 35 bp, Artificial Sequence
  Synthetic oligonucleotide
atcgtagtagtgccgcgctagcctgacgcaaaatt

SEQ ID NO: 931 - DNA, 38 bp, Artificial Sequence
  Synthetic oligonucleotide
aggcgtgcatgacgatttaattaaccaccgaaccatga

SEQ ID NO: 932 - DNA, 36 bp, Artificial Sequence
  Synthetic oligonucleotide
catcatacgaccgcgtgattggtgagttgtaacgga

SEQ ID NO: 933 - DNA, 35 bp, Artificial Sequence
  Synthetic oligonucleotide
catgcaagcttggattttctcacgtttcattgtta

SEQ ID NO: 934 - DNA, 35 bp, Artificial Sequence
  Synthetic oligonucleotide
gcgcataggctttttatatttattctctatgcttt

SEQ ID NO: 935 - DNA, 35 bp, Artificial Sequence
  Synthetic oligonucleotide
gcccgattccagaaaccacgcttttaccatttcct

SEQ ID NO: 936 - DNA, 37 bp, Artificial Sequence
  Synthetic oligonucleotide
gctagcattggcttttgtttatttgcttctatcttga

SEQ ID NO: 937 - DNA, 35 bp, Artificial Sequence
  Synthetic oligonucleotide
gcgctactagccgatatatttccgttccactcttt

SEQ ID NO: 938 - DNA, 36 bp, Artificial Sequence
  Synthetic oligonucleotide
gactaaatacctcactatctccactgtgccgttaaa

SEQ ID NO: 939 - DNA, 35 bp, Artificial Sequence
  Synthetic oligonucleotide
gcaaattctgttcgatccacactattaactcgctt

SEQ ID NO: 940 - DNA, 37 bp, Artificial Sequence
  Synthetic oligonucleotide
gaatcatccggccctaaactccactgtgccctcttga

SEQ ID NO: 941 - DNA, 35 bp, Artificial Sequence
  Synthetic oligonucleotide
tgctaggtgatgaattaatttggtctctttttggt

SEQ ID NO: 942 - DNA, 35 bp, Artificial Sequence
  Synthetic oligonucleotide
gcctacaggatttttgattgatcgatttcgcttct

SEQ ID NO: 943 - DNA, 36 bp, Artificial Sequence
  Synthetic oligonucleotide
catgcaattcttcgcttcctattccttaagcttgta

SEQ ID NO: 944 - DNA, 36 bp, Artificial Sequence
  Synthetic oligonucleotide
gctaactgcttggcgtgcgagctgaaccaacgctta

SEQ ID NO: 945 - DNA, 36 bp, Artificial Sequence
  Synthetic oligonucleotide
gccgaaaacatcgctgttcgtcttatcaactcgccc

SEQ ID NO: 946 - DNA, 36 bp, Artificial Sequence
  Synthetic oligonucleotide
atgcctgtccaaaaactctaccgtgccgtgttacta

SEQ ID NO: 947 - DNA, 37 bp, Artificial Sequence
  Synthetic oligonucleotide
catgcgtcgattcactatcttcgctttcaattgctga

SEQ ID NO: 948 - DNA, 35 bp, Artificial Sequence
  Synthetic oligonucleotide
gtcaaatgtcaatgggcaccacgcactgttcgcgc

SEQ ID NO: 949 - DNA, 36 bp, Artificial Sequence
  Synthetic oligonucleotide
gcgacacgattggtcaattcctcgctttcctctcta

SEQ ID NO: 950 - DNA, 36 bp, Artificial Sequence
  Synthetic oligonucleotide
catagggacggaacgggcacggtagctcctaacgta

SEQ ID NO: 951 - DNA, 36 bp, Artificial Sequence
  Synthetic oligonucleotide
taggcaactactaggtgatgcgtcaattacctctta

SEQ ID NO: 952 - DNA, 38 bp, Artificial Sequence
  Synthetic oligonucleotide
tcacctaccacaagatcgtgcccctgaatcacttgtga

SEQ ID NO: 953 - DNA, 36 bp, Artificial Sequence
  Synthetic oligonucleotide
agtcaggcatggtagacgcttctacttcgctttcta

SEQ ID NO: 954 - DNA, 37 bp, Artificial Sequence
  Synthetic oligonucleotide
taacctaccaagtacatgacctttcacttgatcttga

SEQ ID NO: 955 - DNA, 38 bp, Artificial Sequence
  Synthetic oligonucleotide
tatgccagcttctcatatatcccgctttctatcaatga

SEQ ID NO: 956 - DNA, 35 bp, Artificial Sequence
  Synthetic oligonucleotide
gaagccgcgcgccaagcaaagggtactgcccctct

SEQ ID NO: 957 - DNA, 36 bp, Artificial Sequence
  Synthetic oligonucleotide
atgcacggtgcggccggtcatgcaagacacttcgta

SEQ ID NO: 958 - DNA, 35 bp, Artificial Sequence
  Synthetic oligonucleotide
ttcatttatctccaccgtgcactccatggatctta

SEQ ID NO: 959 - DNA, 36 bp, Artificial Sequence
  Synthetic oligonucleotide
gcaggcttcgaatcctccactgtgctaatacatgaa

SEQ ID NO: 960 - DNA, 35 bp, Artificial Sequence
  Synthetic oligonucleotide
atgcactgttgtgatcggcctgagcaggcgcccaa

SEQ ID NO: 961 - DNA, 38 bp, Artificial Sequence
  Synthetic oligonucleotide
aacccctcgccgcgtgcctggcgacggagtagtaatga

SEQ ID NO: 962 - DNA, 37 bp, Artificial Sequence
  Synthetic oligonucleotide
actccaccgtgccctttaatctcatgtgccacactga

SEQ ID NO: 963 - DNA, 35 bp, Artificial Sequence
  Synthetic oligonucleotide
gcgattatattaatttctctaccgtgcgatcccaa

SEQ ID NO: 964 - DNA, 35 bp, Artificial Sequence
  Synthetic oligonucleotide
atgcatcagcgcgcttattaatcaatcgcttttgt

SEQ ID NO: 965 - DNA, 34 bp, Artificial Sequence
  Synthetic oligonucleotide
gcgtgccagcgtactcgcatctcacagaacccgt

SEQ ID NO: 966 - DNA, 35 bp, Artificial Sequence
  Synthetic oligonucleotide
caaccactattcgcgtgccagggtggggaaacgtt

SEQ ID NO: 967 - DNA, 36 bp, Artificial Sequence
  Synthetic oligonucleotide
tatgcaaccgggactgagagtcctagcgctttttta

SEQ ID NO: 968 - DNA, 36 bp, Artificial Sequence
  Synthetic oligonucleotide
gcccgctttgtcaccggaattaattaactcgcctca

SEQ ID NO: 969 - DNA, 35 bp, Artificial Sequence
  Synthetic oligonucleotide
tcacctactagattcgtgccagaatttcaaatttc

SEQ ID NO: 970 - DNA, 25 bp, Artificial Sequence
  Synthetic oligonucleotide
cgaaagccatgacctccgatcactc

SEQ ID NO: 971 - DNA, 35 bp, Artificial Sequence
  Synthetic oligonucleotide
cctcaagacctaagcgacagcgtgaccttgtttca

SEQ ID NO: 972 - DNA, 68 bp, Artificial Sequence
  Synthetic oligonucleotide
caagtttccaggtagtttgcgtgttttacgtaccctcaagacctaagcgacagcgtgaccttgtttca

SEQ ID NO: 973 - DNA, 66 bp, Artificial Sequence
  Synthetic oligonucleotide
cagggtaggtatcgtgagtgttttacgtactcatcctcttcttttcttggtgttgagaagatgctc

SEQ ID NO: 974 - DNA, 69 bp, Artificial Sequence
  Synthetic oligonucleotide
gaaagtacaggaaaatgcctgctgttttacgtaccacaattctgcgggttagcaggaaggttagggaac

SEQ ID NO: 975 - DNA, 63 bp, Artificial Sequence
  Synthetic oligonucleotide
gagacagagtagggccaatgcgataatgctgttgagattattgagcttcatcatgaccagaag

SEQ ID NO: 976 - DNA, 66 bp, Artificial Sequence
  Synthetic oligonucleotide
gagacagagaaaaagggatagttcgttcggtcaaagacgcctatcttccagtttgatcgggaaact

SEQ ID NO: 977 - DNA, 58 bp, Artificial Sequence
  Synthetic oligonucleotide
gacgcgtggtgggttttacgtaccgaacctaactcctcgctacattcctattgttttc

SEQ ID NO: 978 - DNA, 57 bp, Artificial Sequence
  Synthetic oligonucleotide
gcgcaggaccggttttacgtacccaatttggttttactcccctcgattatgcggagt

SEQ ID NO: 979 - DNA, 60 bp, Artificial Sequence
  Synthetic oligonucleotide
gagacagaaagtcgcatgggcagtactttcgggttatatctatcatttacttgacaccct

SEQ ID NO: 980 - DNA, 67 bp, Artificial Sequence
  Synthetic oligonucleotide
agtggagtttaattggccttcagttacgtactcaacagccactttttttccaaattttgcaagagcc

SEQ ID NO: 981 - DNA, 66 bp, Artificial Sequence
  Synthetic oligonucleotide
gaacgattcgtagggtatgcatgtacgtactcaccgtgtggacggcaactcagagataacgcatat

SEQ ID NO: 982 - DNA, 60 bp, Artificial Sequence
  Synthetic oligonucleotide
agtatcaacgccggcatgtacgtaccctggagtttatgtattgccaacgagtttgtcttt

SEQ ID NO: 983 - DNA, 60 bp, Artificial Sequence
  Synthetic oligonucleotide
taaagggcgtggcatgtctacgtaccagataaggttgttattgtggaggatgttactaca

SEQ ID NO: 984 - DNA, 66 bp, Artificial Sequence
  Synthetic oligonucleotide
gagacagaacattggcacagtagagataggtcttccttcctgtgttccagctacaaacttagaaac

SEQ ID NO: 985 - DNA, 63 bp, Artificial Sequence
  Synthetic oligonucleotide
taatggcagccttacgtacctacgtactcataaaattggttttgcctttcagcaattcaactt

SEQ ID NO: 986 - DNA, 55 bp, Artificial Sequence
  Synthetic oligonucleotide
cgggcgcactgactacgtacctggtcaagacttgcatgaggacccgcaaattcct

SEQ ID NO: 987 - DNA, 57 bp, Artificial Sequence
  Synthetic oligonucleotide
gagacaggaagggcaccgtagactttcgttgggacgcttgaagcgcaagtagaaaac

SEQ ID NO: 988 - DNA, 58 bp, Artificial Sequence
  Synthetic oligonucleotide
ccatcgcgactgcactacgtactccagcagacctgcaatatcaaagttataagcgcgt

SEQ ID NO: 989 - DNA, 63 bp, Artificial Sequence
  Synthetic oligonucleotide
gagacagtcaaggcacagtggagtaatgcctgccaatgcactcgatcttgtcatttttttgcg

SEQ ID NO: 990 - DNA, 67 bp, Artificial Sequence
  Synthetic oligonucleotide
ggtagagaatacaagggtctgcaactacgtaccaaactggagagagaagtgaagacgatttaaccca

SEQ ID NO: 991 - DNA, 57 bp, Artificial Sequence
  Synthetic oligonucleotide
cggttcgcatggccatacgtaccgattgctgcattccgctcaacgcttgaggaagta

SEQ ID NO: 992 - DNA, 60 bp, Artificial Sequence
  Synthetic oligonucleotide
gaaggggatgaccgcaatacgtactctgaggctgttaaagctgtagcaactcttccacga

SEQ ID NO: 993 - DNA, 58 bp, Artificial Sequence
  Synthetic oligonucleotide
ccagtgacctgcagtgacgtactctaggacgcaaatcacttgaagaagtgaaagcgag

SEQ ID NO: 994 - DNA, 69 bp, Artificial Sequence
  Synthetic oligonucleotide
tggagttcaacaatatcagttagcagtgacgtacccacgcgatgacgttcgtcaagagtcgcataatct

SEQ ID NO: 995 - DNA, 58 bp, Artificial Sequence
  Synthetic oligonucleotide
cctgccacagtacctgacgtactcatttggaatgatgtgtactgggaataagacgacg

SEQ ID NO: 996 - DNA, 58 bp, Artificial Sequence
  Synthetic oligonucleotide
ctggactgctgacctgacgtactcacaagaatccctgctagctgaaggagggtcaaac

SEQ ID NO: 997 - DNA, 66 bp, Artificial Sequence
  Synthetic oligonucleotide
gaaaaatgacagacagcggttactgacgtaccttgacgtagattgctatcaggttacgatgactgc

SEQ ID NO: 998 - DNA, 64 bp, Artificial Sequence
  Synthetic oligonucleotide
aggttcgacgactacagttactgacgtaccttacagatcgtgtgctcatgacttccacagacgt

SEQ ID NO: 999 - DNA, 61 bp, Artificial Sequence
  Synthetic oligonucleotide
cgcatgagcttccttactgacgtactcttggaggagttgatagtggtaaaacaacattagc

SEQ ID NO: 1000 - DNA, 65 bp, Artificial Sequence
  Synthetic oligonucleotide
gagacagtcaagtatttacaagtggcgcagcctacgtatatatccaagtggttatgtccgacggc

SEQ ID NO: 1001 - DNA, 75 bp, Artificial Sequence
  Synthetic oligonucleotide
gagacagtaaaataagagagaacgtactagcttcgcattacagcaagaaggagtatggaacttatagcaagagag

SEQ ID NO: 1002 - DNA, 66 bp, Artificial Sequence
  Synthetic oligonucleotide
ggaaagaatcgcgatgtttgtactgacgtaccacccctccaaacgcattcttattggcaaatggaa

SEQ ID NO: 1003 - DNA, 57 bp, Artificial Sequence
  Synthetic oligonucleotide
ggcgtttacgggcatgacgtaccccgaagcaatactgtcgtcactctgtatgtccgt

SEQ ID NO: 1004 - DNA, 57 bp, Artificial Sequence
  Synthetic oligonucleotide
gtcgaaaggcggcatgacgtacccgggaatcggcatttcgcattcttaggatctaaa

SEQ ID NO: 1005 - DNA, 70 bp, Artificial Sequence
  Synthetic oligonucleotide
gagacaggagtgaatgagtttgagtatggaatgacccgatcttcataacggacaaactgaacgggccatt

SEQ ID NO: 1006 - DNA, 64 bp, Artificial Sequence
  Synthetic oligonucleotide
gttaatggaagcttgtcgcatgacgtactcgctatgcagacgagctggcagaggagagaaatca

SEQ ID NO: 1007 - DNA, 63 bp, Artificial Sequence
  Synthetic oligonucleotide
atgataagggtagctcgcatgacgtactcattcgcaaccatgtgaagtaatgtgagcgtactt

SEQ ID NO: 1008 - DNA, 56 bp, Artificial Sequence
  Synthetic oligonucleotide
ggcgcaatcgcatgacgtactcaccagttagcgtggcgtataccatgttgttaaca

SEQ ID NO: 1009 - DNA, 67 bp, Artificial Sequence
  Synthetic oligonucleotide
gagacagtgataatttagggctacggagtacgcctgaatcaatagaacaatatcagttatggcggtg

SEQ ID NO: 1010 - DNA, 67 bp, Artificial Sequence
  Synthetic oligonucleotide
gagacagatgattagggtagtagagaacgcaccggttgttaatatgacaggccgctaaagacgttct

SEQ ID NO: 1011 - DNA, 68 bp, Artificial Sequence
  Synthetic oligonucleotide
gagacagtttgaatcatgagtttgtgaaagcgtccgtctcagatgagtgggttaatcaatcaagtatg

SEQ ID NO: 1012 - DNA, 64 bp, Artificial Sequence
  Synthetic oligonucleotide
gagagaataggacgtacgcatgacgtactctgacacattagtaacgtcggcaagcacttagtcg

SEQ ID NO: 1013 - DNA, 58 bp, Artificial Sequence
  Synthetic oligonucleotide
tgggtgtgcgtacatgacgtactcgtgaaccagattatgtatggacgcgcaatagata

SEQ ID NO: 1014 - DNA, 58 bp, Artificial Sequence
  Synthetic oligonucleotide
ggtttccgcattgcaggacgtaccatacgaaatttgagcaagcaattgaaggcttaga

SEQ ID NO: 1015 - DNA, 53 bp, Artificial Sequence
  Synthetic oligonucleotide
ccctggctcgcgacgtacctatcagctaatagggtcggctcaacagtgtatcc

SEQ ID NO: 1016 - DNA, 62 bp, Artificial Sequence
  Synthetic oligonucleotide
cagtagagaacaagtcgcacgacgtacctatcaattcgtgaccccgatcatccagtccagaa

SEQ ID NO: 1017 - DNA, 61 bp, Artificial Sequence
  Synthetic oligonucleotide
gagacaggcaaagatgaaagcgcatgcttgagctctaggcccaaaacgaccttaatggtca

SEQ ID NO: 1018 - DNA, 52 bp, Artificial Sequence
  Synthetic oligonucleotide
tgcccgccctcacgtacctagcccagatcctacgagatgagctacgtaacta

SEQ ID NO: 1019 - DNA, 55 bp, Artificial Sequence
  Synthetic oligonucleotide
gttggaccgccctcacgtaccaaatgcactctatatggagggagagtagctggat

SEQ ID NO: 1020 - DNA, 57 bp, Artificial Sequence
  Synthetic oligonucleotide
actcctgtacgccctcacgtaccctggtctaggtatctaattcgtgggtcgggtact

SEQ ID NO: 1021 - DNA, 63 bp, Artificial Sequence
  Synthetic oligonucleotide
gccattaacttcagtagccctcacgtaccattagctcggatgctatcagcttgcgcctattat

SEQ ID NO: 1022 - DNA, 65 bp, Artificial Sequence
  Synthetic oligonucleotide
gagacaggataaaggtaagaaaagcggctgcacgatctgtattttgcacctttcgctatgctgag

SEQ ID NO: 1023 - DNA, 64 bp, Artificial Sequence
  Synthetic oligonucleotide
gagacagtcaggaaggaaaatgtacgcacctgtgtccgtctatacgcatactggtccacatata

SEQ ID NO: 1024 - DNA, 62 bp, Artificial Sequence
  Synthetic oligonucleotide
gagacagagggacaaggaggaaattggcatgttggagttaacggagacccgccatcgtttac

SEQ ID NO: 1025 - DNA, 53 bp, Artificial Sequence
  Synthetic oligonucleotide
ggacggcccctcacgtaccgctcattttgaacatacgattgcgattacggaaa

SEQ ID NO: 1026 - DNA, 55 bp, Artificial Sequence
  Synthetic oligonucleotide
atgaccgcccctcacgtactcctatgcatcatgtgcctcactaggacatcatgct

SEQ ID NO: 1027 - DNA, 66 bp, Artificial Sequence
  Synthetic oligonucleotide
cacagtagaggaatatgcgctatcacgtactcctaaattgggaaaaaaggttttagctattgatgg

SEQ ID NO: 1028 - DNA, 59 bp, Artificial Sequence
  Synthetic oligonucleotide
gagacagtcattgggcacggtagacttcagttaaaggctatcttgctccgctcgttctc

SEQ ID NO: 1029 - DNA, 61 bp, Artificial Sequence
  Synthetic oligonucleotide
gcacggtagagagtagttgcacgtaccttaaagctatccacgaatgtcaaaaatgtggttt

SEQ ID NO: 1030 - DNA, 73 bp, Artificial Sequence
  Synthetic oligonucleotide
gagacagtatgagataagcacagtagagattgacatgtcccgaatgtataatgctgacgttcttgcttttggc

SEQ ID NO: 1031 - DNA, 58 bp, Artificial Sequence
  Synthetic oligonucleotide
gagacagtaggggcacggtagagcctattgaagcaatcctctccccaatacttaaaaa

SEQ ID NO: 1032 - DNA, 54 bp, Artificial Sequence
  Synthetic oligonucleotide
gggggtgtcctgcacgtacctacggttaccgtctttataagtgaacaaaaccgg

SEQ ID NO: 1033 - DNA, 63 bp, Artificial Sequence
  Synthetic oligonucleotide
gtagagtatccacgcaaactgcacgtacctctgtgaactgtcatcggtccgatcaattagtct

SEQ ID NO: 1034 - DNA, 63 bp, Artificial Sequence
  Synthetic oligonucleotide
gcacggtagagttcatgtatgcacgtacctcccctttcccaagtaaatgtacgggaattatcg

SEQ ID NO: 1035 - DNA, 67 bp, Artificial Sequence
  Synthetic oligonucleotide
gagacagggcacggtagagtaaaataatgtgacgctttattatgtgttcgtctaactctgtttctgt

SEQ ID NO: 1036 - DNA, 57 bp, Artificial Sequence
  Synthetic oligonucleotide
aaagtgcgcctgatgcacgtacccgagtgcatgagctgtctttcacatgatacatcg

SEQ ID NO: 1037 - DNA, 61 bp, Artificial Sequence
  Synthetic oligonucleotide
ctcgagaacgatactgtggcacgtacctatttctgttcacggatgaaggcctatatcaatg

SEQ ID NO: 1038 - DNA, 55 bp, Artificial Sequence
  Synthetic oligonucleotide
ccctctcgcatggcacgtacccatccactttcatggaaacaataagagcagggaa

SEQ ID NO: 1039 - DNA, 62 bp, Artificial Sequence
  Synthetic oligonucleotide
gagacagtcacgtcatttcagatggcacacaaactcactactaccaacaacctcaccaaaaa

SEQ ID NO: 1040 - DNA, 78 bp, Artificial Sequence
  Synthetic oligonucleotide
gagacagtcaaccttaatataagcacagtagagttacaagttcctcatgtcctctgttaatccagcctgaatatgcca

SEQ ID NO: 1041 - DNA, 62 bp, Artificial Sequence
  Synthetic oligonucleotide
gcacagtagagtattggtcgcacgtaccagaaatgtcactcccatggtggctgatatagaaa

SEQ ID NO: 1042 - DNA, 58 bp, Artificial Sequence
  Synthetic oligonucleotide
gagacagaggagtgagcacggttcatgtcgaaccttggataggagcgaccgattacgt

SEQ ID NO: 1043 - DNA, 62 bp, Artificial Sequence
  Synthetic oligonucleotide
ggttacatgggctttatcgcacgtactctcaggttgttacttgaagggttcaacacgagctc

SEQ ID NO: 1044 - DNA, 60 bp, Artificial Sequence
  Synthetic oligonucleotide
ggtagagacaacttgcgcacgtactcagaagatcaaaaaacgatccctgtccatcaatac

SEQ ID NO: 1045 - DNA, 65 bp, Artificial Sequence
  Synthetic oligonucleotide
gagacagaataaagcacggtggagacaatgcttaggctaccaaatgaatttaaagccagctgaaa

SEQ ID NO: 1046 - DNA, 65 bp, Artificial Sequence
  Synthetic oligonucleotide
gagacagtaggaaataggcacggtagagttccaatgcttgcagtatgtatcctgatcgtgcgtgc

SEQ ID NO: 1047 - DNA, 53 bp, Artificial Sequence
  Synthetic oligonucleotide
aggtcggtgcgcacgtaccctgcattctcatggaaatgcaatggattcattcc

SEQ ID NO: 1048 - DNA, 54 bp, Artificial Sequence
  Synthetic oligonucleotide
gtgtggtggcgcacgtactcctgttgcagtatcacgtaaatacctacttcgata

SEQ ID NO: 1049 - DNA, 67 bp, Artificial Sequence
  Synthetic oligonucleotide
gagacagaagaaagtaatcggaagtcgggtagctagctgttatggctattgctgaaacagcaaaatt

SEQ ID NO: 1050 - DNA, 65 bp, Artificial Sequence
  Synthetic oligonucleotide
acagtagagtaatatagtccgcgcacgtacccttacgacttcactgcaattgacgattcagttaa

SEQ ID NO: 1051 - DNA, 67 bp, Artificial Sequence
  Synthetic oligonucleotide
gagacagcaaaaaggtggttgtataaagtgcccctcataccaatgtaaagtatagttaacgccctgt

SEQ ID NO: 1052 - DNA, 61 bp, Artificial Sequence
  Synthetic oligonucleotide
gagacaggatggcacagtggagtaagcatctccatgactgcttgagcggctggagaatctg

SEQ ID NO: 1053 - DNA, 58 bp, Artificial Sequence
  Synthetic oligonucleotide
acagtagaggtcaccgcacgtacctttcgccacccatataaaccccacttcgtcctca

SEQ ID NO: 1054 - DNA, 60 bp, Artificial Sequence
  Synthetic oligonucleotide
cggtagaggttctgtacgcacgtaccaaggcagagcaaatgtgacactgtctatcagtac

SEQ ID NO: 1055 - DNA, 53 bp, Artificial Sequence
  Synthetic oligonucleotide
gggaggggacgcacgtaccctacatatataggaaaagggaaggtagaagagct

SEQ ID NO: 1056 - DNA, 66 bp, Artificial Sequence
  Synthetic oligonucleotide
gagacaggaaaatcgcatacgtcttgcatacccttctggaatttcttcctttgattttgccatttt

SEQ ID NO: 1057 - DNA, 59 bp, Artificial Sequence
  Synthetic oligonucleotide
gaggtggatcggtctagcacgtacctcctaaggttgctgatttggttgttggagaccca

SEQ ID NO: 1058 - DNA, 61 bp, Artificial Sequence
  Synthetic oligonucleotide
acggtagagctaagctagcacgtactcaaggcctagcctaaaggttcttgcagagcaacat

SEQ ID NO: 1059 - DNA, 53 bp, Artificial Sequence
  Synthetic oligonucleotide
cggcctgcagcacgtactcctaattagctctaggaaacacaaccccgggattt

SEQ ID NO: 1060 - DNA, 56 bp, Artificial Sequence
  Synthetic oligonucleotide
gaacgcctgaccagcacgtaccttgagttatacggaacttcgcaaaagtattccct

SEQ ID NO: 1061 - DNA, 73 bp, Artificial Sequence
  Synthetic oligonucleotide
gagacagaaatgcacagtagagtaaaatatcttgcctgccatccatcaacaactgctccaacagcctttccat

SEQ ID NO: 1062 - DNA, 62 bp, Artificial Sequence
  Synthetic oligonucleotide
gagacaggcacagtagaggtgaggataccggcacaagcagacaaaatcaacatggtcattta

SEQ ID NO: 1063 - DNA, 60 bp, Artificial Sequence
  Synthetic oligonucleotide
gagacagggcataaagggcacagtacgctcacgtgatctaccctagctgaccgctaatga

SEQ ID NO: 1064 - DNA, 60 bp, Artificial Sequence
  Synthetic oligonucleotide
gagacagtcaaggagcacggtagagctctaacctgcatacatatggcatttagttgttca

SEQ ID NO: 1065 - DNA, 63 bp, Artificial Sequence
  Synthetic oligonucleotide
ggcacggtagagaaatcgcataacgtacccttcttgaagacctatgtaaagaaacgggtcact

SEQ ID NO: 1066 - DNA, 66 bp, Artificial Sequence
  Synthetic oligonucleotide
gagacagaggataaggtcgtgtaataggtggccatacgcatgactacattacaacgggccaggaag

SEQ ID NO: 1067 - DNA, 64 bp, Artificial Sequence
  Synthetic oligonucleotide
gagacagagaagaaagtaagcgttggcaccaggtctcgatctcgtacaaaacgactatgaccat

SEQ ID NO: 1068 - DNA, 60 bp, Artificial Sequence
  Synthetic oligonucleotide
ccggctatgactgcttgaacgtactcatgaacgtgtcgtgttatgcagcggtatgtcgtg

SEQ ID NO: 1069 - DNA, 59 bp, Artificial Sequence
  Synthetic oligonucleotide
gagacagtttggtggcacggtagacgtcgtgtcttagacgactgtgtgtgattctcgag

SEQ ID NO: 1070 - DNA, 58 bp, Artificial Sequence
  Synthetic oligonucleotide
gcgaaatgactgcgcaacgtactccaccgttttgccagttccaccagtaactgtaagg

SEQ ID NO: 1071 - DNA, 61 bp, Artificial Sequence
  Synthetic oligonucleotide
agagtactaccgcctgacaacgtactcgccctggaacaacggttatattctctggcagaac

SEQ ID NO: 1072 - DNA, 38 bp, Artificial Sequence
  Synthetic oligonucleotide
tcggacttgatctacacattgacacattgataccctga

SEQ ID NO: 1073 - DNA, 37 bp, Artificial Sequence
  Synthetic oligonucleotide
cgtttgacttagacggactgccttgatcactgactga

SEQ ID NO: 1074 - DNA, 37 bp, Artificial Sequence
  Synthetic oligonucleotide
gagttctccttaaaatctgaccctgacaacgagtgga

SEQ ID NO: 1075 - DNA, 38 bp, Artificial Sequence
  Synthetic oligonucleotide
atactggaggtcatgattctgatcccgtgatattctga

SEQ ID NO: 1076 - DNA, 38 bp, Artificial Sequence
  Synthetic oligonucleotide
ggatacacgggagtctgcgttgacacattttgatttga

SEQ ID NO: 1077 - DNA, 38 bp, Artificial Sequence
  Synthetic oligonucleotide
gtttgcaattgcttaggatactcaacctgactccatga

SEQ ID NO: 1078 - DNA, 38 bp, Artificial Sequence
  Synthetic oligonucleotide
gcggtatttatgataatgactcgtgaccccaatattga

SEQ ID NO: 1079 - DNA, 38 bp, Artificial Sequence
  Synthetic oligonucleotide
ggtcagctagtaaagtttatccgatgatttgattttga

SEQ ID NO: 1080 - DNA, 37 bp, Artificial Sequence
  Synthetic oligonucleotide
gcaggatagtcatgcaaaatattcaacgataattaga

SEQ ID NO: 1081 - DNA, 38 bp, Artificial Sequence
  Synthetic oligonucleotide
tgtgactataacgcactaagccgattctgacgatatga

SEQ ID NO: 1082 - DNA, 38 bp, Artificial Sequence
  Synthetic oligonucleotide
ttttgtacctgcttcgataaccaacagttaggatttga

SEQ ID NO: 1083 - DNA, 38 bp, Artificial Sequence
  Synthetic oligonucleotide
gactatcaaatgaccccgatcgatacgtaggacactga

SEQ ID NO: 1084 - DNA, 36 bp, Artificial Sequence
  Synthetic oligonucleotide
aactggccgtgtgtgccggtgggataactgttacta

SEQ ID NO: 1085 - DNA, 36 bp, Artificial Sequence
  Synthetic oligonucleotide
gaggactagccgatacttgataatgattatgacgta

SEQ ID NO: 1086 - DNA, 37 bp, Artificial Sequence
  Synthetic oligonucleotide
gtgaatgacacacgtctgaccttggatcgctgattga

SEQ ID NO: 1087 - DNA, 38 bp, Artificial Sequence
  Synthetic oligonucleotide
accgtggacttattgcttatattggacttagagcctga

SEQ ID NO: 1088 - DNA, 36 bp, Artificial Sequence
  Synthetic oligonucleotide
gaggacgtacgccttgatgtttaactggattactga

SEQ ID NO: 1089 - DNA, 36 bp, Artificial Sequence
  Synthetic oligonucleotide
caccccttttgattatccttattgatacttatatga

SEQ ID NO: 1090 - DNA, 38 bp, Artificial Sequence
  Synthetic oligonucleotide
tcccgtgatgtgggaacgtagatctttgactgatttga

SEQ ID NO: 1091 - DNA, 38 bp, Artificial Sequence
  Synthetic oligonucleotide
tcgtaatgcccaataaccaactggttaagtagacctga

SEQ ID NO: 1092 - DNA, 36 bp, Artificial Sequence
  Synthetic oligonucleotide
gcgatcacaatttaccggaccgatctccctagacaa

SEQ ID NO: 1093 - DNA, 36 bp, Artificial Sequence
  Synthetic oligonucleotide
gcgtacggaacggaaccgacacaacctgaataccta

SEQ ID NO: 1094 - DNA, 36 bp, Artificial Sequence
  Synthetic oligonucleotide
gcgtacggaacggaaccgacacaacctgaataccga

SEQ ID NO: 1095 - DNA, 38 bp, Artificial Sequence
  Synthetic oligonucleotide
gcttgaatccacgacgaaattacttaaaataaccctga

SEQ ID NO: 1096 - DNA, 38 bp, Artificial Sequence
  Synthetic oligonucleotide
gccggggcggagcctacgatttatatcgcgattattga

SEQ ID NO: 1097 - DNA, 38 bp, Artificial Sequence
  Synthetic oligonucleotide
aagtgcacactgcctcgatttacatttcggacctatga

SEQ ID NO: 1098 - DNA, 38 bp, Artificial Sequence
  Synthetic oligonucleotide
gcgtactgtgcgcgattccgggatatatattcgattga

SEQ ID NO: 1099 - DNA, 38 bp, Artificial Sequence
  Synthetic oligonucleotide
cacagacgttctcgttgatacccggacccgatatttga

SEQ ID NO: 1100 - DNA, 38 bp, Artificial Sequence
  Synthetic oligonucleotide
tccattttggaacgtcgaattactcggatactaattga

SEQ ID NO: 1101 - DNA, 38 bp, Artificial Sequence
  Synthetic oligonucleotide
actcgacgtaaaactatctgtgactcctaatacattga

SEQ ID NO: 1102 - DNA, 38 bp, Artificial Sequence
  Synthetic oligonucleotide
accgtaacttgctagccttccggatccctccaatctga

SEQ ID NO: 1103 - DNA, 38 bp, Artificial Sequence
  Synthetic oligonucleotide
ttcgtacagatacccccgataccccgccacctgattga

SEQ ID NO: 1104 - DNA, 34 bp, Artificial Sequence
  Synthetic oligonucleotide
atattaatgccttgatccgactccgacctcttga

SEQ ID NO: 1105 - DNA, 38 bp, Artificial Sequence
  Synthetic oligonucleotide
ttgacgcgacgtactattttgatcgtattccaatctga

SEQ ID NO: 1106 - DNA, 38 bp, Artificial Sequence
  Synthetic oligonucleotide
gcgccgccacggtacttaaaaactcggactttacttga

SEQ ID NO: 1107 - DNA, 38 bp, Artificial Sequence
  Synthetic oligonucleotide
cgtagtactgctacatccgaaccgaccataaatactga

SEQ ID NO: 1108 - DNA, 38 bp, Artificial Sequence
  Synthetic oligonucleotide
gaggacgcagttgaccggatttccaccgattatattga

SEQ ID NO: 1109 - DNA, 38 bp, Artificial Sequence
  Synthetic oligonucleotide
gaggactgaaccatctcggaccacccatggatacttga

SEQ ID NO: 1110 - DNA, 38 bp, Artificial Sequence
  Synthetic oligonucleotide
tgcgcgagcaaacgcgactattgaaccttagaacctga

SEQ ID NO: 1111 - DNA, 35 bp, Artificial Sequence
  Synthetic oligonucleotide
gctggtgacccctcttgaccttccttattgatttg

SEQ ID NO: 1112 - DNA, 38 bp, Artificial Sequence
  Synthetic oligonucleotide
gagtacctcaccgctttcgattatcgttctgaccttga

SEQ ID NO: 1113 - DNA, 36 bp, Artificial Sequence
  Synthetic oligonucleotide
agccacttcctgctttgaaccggactccttatataa

SEQ ID NO: 1114 - DNA, 38 bp, Artificial Sequence
  Synthetic oligonucleotide
attgagcgtacgcatctaccggattaccttacttttga

SEQ ID NO: 1115 - DNA, 37 bp, Artificial Sequence
  Synthetic oligonucleotide
gaacttacgttactaacctgactctatcttacattga

SEQ ID NO: 1116 - DNA, 37 bp, Artificial Sequence
  Synthetic oligonucleotide
gcaccactattgtgggaattcctgattttactattga

SEQ ID NO: 1117 - DNA, 37 bp, Artificial Sequence
  Synthetic oligonucleotide
gcgtgcctgcctggctctgactccgattattcattga

SEQ ID NO: 1118 - DNA, 38 bp, Artificial Sequence
  Synthetic oligonucleotide
agttccttactaacacaacttttggatatttaaattga

SEQ ID NO: 1119 - DNA, 37 bp, Artificial Sequence
  Synthetic oligonucleotide
actgccttttcttactgggatacttattgattattga

SEQ ID NO: 1120 - DNA, 38 bp, Artificial Sequence
  Synthetic oligonucleotide
atagtacactacctactgactccctatattatgaatga

SEQ ID NO: 1121 - DNA, 38 bp, Artificial Sequence
  Synthetic oligonucleotide
gcgatacaacccttcatttctgactaccgatatattga

SEQ ID NO: 1122 - DNA, 36 bp, Artificial Sequence
  Synthetic oligonucleotide
gcatctttcttcttaatgatttaccgttctcacata

SEQ ID NO: 1123 - DNA, 36 bp, Artificial Sequence
  Synthetic oligonucleotide
accacgtgttattctctgtatttcactttgtctcaa

SEQ ID NO: 1124 - DNA, 36 bp, Artificial Sequence
  Synthetic oligonucleotide
accgggaacatttctgtcgtttcatttcatcactaa

SEQ ID NO: 1125 - DNA, 36 bp, Artificial Sequence
  Synthetic oligonucleotide
agtttattgctccttcccactattgtctatctcgca

SEQ ID NO: 1126 - DNA, 36 bp, Artificial Sequence
  Synthetic oligonucleotide
tcgcttccttgtacttcctatacccttttcaccaca

SEQ ID NO: 1127 - DNA, 35 bp, Artificial Sequence
  Synthetic oligonucleotide
actaactcgcccactcttctcatttggaacctatc

SEQ ID NO: 1128 - DNA, 36 bp, Artificial Sequence
  Synthetic oligonucleotide
actccccctcagctatcatacatcactcgcatctaa

SEQ ID NO: 1129 - DNA, 38 bp, Artificial Sequence
  Synthetic oligonucleotide
aatatatacgcgctacaaatcttttctcctactgatga

SEQ ID NO: 1130 - DNA, 37 bp, Artificial Sequence
  Synthetic oligonucleotide
actatactcacatcctatttaattattggcttaatga

SEQ ID NO: 1131 - DNA, 38 bp, Artificial Sequence
  Synthetic oligonucleotide
atcgatcctgcctaacctggtaaacaactcatttctga

SEQ ID NO: 1132 - DNA, 35 bp, Artificial Sequence
  Synthetic oligonucleotide
ttagctgcttcccagacccaagctattatttttca

SEQ ID NO: 1133 - DNA, 36 bp, Artificial Sequence
  Synthetic oligonucleotide
tccctgcatcttaacttctatagggtttgcttaaaa

SEQ ID NO: 1134 - DNA, 36 bp, Artificial Sequence
  Synthetic oligonucleotide
gggtcactccgtaaggcctctactccaaattataaa

SEQ ID NO: 1135 - DNA, 36 bp, Artificial Sequence
  Synthetic oligonucleotide
aactgtacggcgcaattttactctcaagtaccaaca

SEQ ID NO: 1136 - DNA, 35 bp, Artificial Sequence
  Synthetic oligonucleotide
tgcggactttattcgcttgatgcctatcctgttat

SEQ ID NO: 1137 - DNA, 36 bp, Artificial Sequence
  Synthetic oligonucleotide
tccgccacatcgggttatacttttgaactagttaaa

SEQ ID NO: 1138 - DNA, 38 bp, Artificial Sequence
  Synthetic oligonucleotide
tgttccttcgagttccatcccaaagagttaattcatga

SEQ ID NO: 1139 - DNA, 35 bp, Artificial Sequence
  Synthetic oligonucleotide
tcctgcgactctacggtatattcctttaatcgaca

SEQ ID NO: 1140 - DNA, 38 bp, Artificial Sequence
  Synthetic oligonucleotide
agtaaaattccggttcatccacactgagctttcaatga

SEQ ID NO: 1141 - DNA, 36 bp, Artificial Sequence
  Synthetic oligonucleotide
ttaactccttgaagtacgtcctaggccccctcacca

SEQ ID NO: 1142 - DNA, 36 bp, Artificial Sequence
  Synthetic oligonucleotide
tggagtactggtgccgaacgtttttgaacgggttga

SEQ ID NO: 1143 - DNA, 38 bp, Artificial Sequence
  Synthetic oligonucleotide
gagtactatagagccaagacctcatttagtcactctga

SEQ ID NO: 1144 - DNA, 36 bp, Artificial Sequence
  Synthetic oligonucleotide
ccgacccataacactttcgcttcaagcatctaggca

SEQ ID NO: 1145 - DNA, 36 bp, Artificial Sequence
  Synthetic oligonucleotide
cgtccgcacccctttttcaccttgttctgctatgca

SEQ ID NO: 1146 - DNA, 35 bp, Artificial Sequence
  Synthetic oligonucleotide
gagcctctgtaacccaatcttcaactgcagggacc

SEQ ID NO: 1147 - DNA, 35 bp, Artificial Sequence
  Synthetic oligonucleotide
gagttctccagctagatattccaatacggaaccga

SEQ ID NO: 1148 - DNA, 38 bp, Artificial Sequence
  Synthetic oligonucleotide
gagtattgcgaagattgggtttatcggttctaacatga

SEQ ID NO: 1149 - DNA, 37 bp, Artificial Sequence
  Synthetic oligonucleotide
aaacgctattacggctgacccggtgactcgggattga

SEQ ID NO: 1150 - DNA, 36 bp, Artificial Sequence
  Synthetic oligonucleotide
accgactccagtttcacgggaatattctcaccggga

SEQ ID NO: 1151 - DNA, 38 bp, Artificial Sequence
  Synthetic oligonucleotide
gttgtcggtttccattagttcgatatcttgccgtgaga

SEQ ID NO: 1152 - DNA, 38 bp, Artificial Sequence
  Synthetic oligonucleotide
atgggaatcacgtagctgtaacgataatccatgggtga

SEQ ID NO: 1153 - DNA, 35 bp, Artificial Sequence
  Synthetic oligonucleotide
aggtactgacgattctttaaagtgactactggtga

SEQ ID NO: 1154 - DNA, 38 bp, Artificial Sequence
  Synthetic oligonucleotide
ggcggtggaagtccgaactgccgagttaaattccctga

SEQ ID NO: 1155 - DNA, 38 bp, Artificial Sequence
  Synthetic oligonucleotide
tatcggtcttacgaaagccggcacgtacgtttctttga

SEQ ID NO: 1156 - DNA, 38 bp, Artificial Sequence
  Synthetic oligonucleotide
tgacggatgataggcatgacctcgtagaccacatctga

SEQ ID NO: 1157 - DNA, 38 bp, Artificial Sequence
  Synthetic oligonucleotide
tttgtaccatccttacaaatgagatcttgttatgttga

SEQ ID NO: 1158 - DNA, 36 bp, Artificial Sequence
  Synthetic oligonucleotide
tacatgcgtactataaaccctattgtttactggtaa

SEQ ID NO: 1159 - DNA, 35 bp, Artificial Sequence
  Synthetic oligonucleotide
gcaagtctagatcttcattcatttgttcatgtttt

SEQ ID NO: 1160 - DNA, 35 bp, Artificial Sequence
  Synthetic oligonucleotide
gagtttgcgggaatcttccccgaacaaggggctaa

SEQ ID NO: 1161 - DNA, 35 bp, Artificial Sequence
  Synthetic oligonucleotide
tagaccgttggaggtccggggttggtgcccgatta

SEQ ID NO: 1162 - DNA, 37 bp, Artificial Sequence
  Synthetic oligonucleotide
acactcatacgagatctgattatacacgcgccttgga

SEQ ID NO: 1163 - DNA, 37 bp, Artificial Sequence
  Synthetic oligonucleotide
gtcgtcgggagaccacttatcttttttccatgccgga

SEQ ID NO: 1164 - DNA, 35 bp, Artificial Sequence
  Synthetic oligonucleotide
tcacctgacgttacactcctccgtacaaacgtgta

SEQ ID NO: 1165 - DNA, 35 bp, Artificial Sequence
  Synthetic oligonucleotide
tcctgattaattcatggtcacaactcccggtttcc

SEQ ID NO: 1166 - DNA, 36 bp, Artificial Sequence
  Synthetic oligonucleotide
tccttttgcccatgattattctcgatgtaaaaacga

SEQ ID NO: 1167 - DNA, 37 bp, Artificial Sequence
  Synthetic oligonucleotide
aacgctaatatctgccgatgggaatcctcgattagga

SEQ ID NO: 1168 - DNA, 37 bp, Artificial Sequence
  Synthetic oligonucleotide
agggtgatatttacgttatcttcgaatttctactgga

SEQ ID NO: 1169 - DNA, 36 bp, Artificial Sequence
  Synthetic oligonucleotide
tctcacttacaaagcgtttaatcaacgcagttctta

SEQ ID NO: 1170 - DNA, 37 bp, Artificial Sequence
  Synthetic oligonucleotide
ccgcaaacttaggggctaataattttcgttatccgga

SEQ ID NO: 1171 - DNA, 37 bp, Artificial Sequence
  Synthetic oligonucleotide
tgccagaaaatcgaatttttatacgtaatggcatgga

SEQ ID NO: 1172 - DNA, 35 bp, Artificial Sequence
  Synthetic oligonucleotide
atcgatcctgacgccgaaaacttgacacgactaaa

SEQ ID NO: 1173 - DNA, 35 bp, Artificial Sequence
  Synthetic oligonucleotide
atgctggtaacttttgcacatcttacttggtaaac

SEQ ID NO: 1174 - DNA, 36 bp, Artificial Sequence
  Synthetic oligonucleotide
gcgattactcagcacccccttacttgtttttaatca

SEQ ID NO: 1175 - DNA, 35 bp, Artificial Sequence
  Synthetic oligonucleotide
actgcgggactatctgaattattggtattataaca

SEQ ID NO: 1176 - DNA, 36 bp, Artificial Sequence
  Synthetic oligonucleotide
gagtactgaaggaactggaaccgagtattcttgtca

SEQ ID NO: 1177 - DNA, 36 bp, Artificial Sequence
  Synthetic oligonucleotide
gagaactgcctggtaatatattcccaaacctggaca

SEQ ID NO: 1178 - DNA, 36 bp, Artificial Sequence
  Synthetic oligonucleotide
gagtgcgtaggtcttacatcctatcgaatatttaca

SEQ ID NO: 1179 - DNA, 36 bp, Artificial Sequence
  Synthetic oligonucleotide
ctcagactttacacaatctttctctccacacaagca

SEQ ID NO: 1180 - DNA, 35 bp, Artificial Sequence
  Synthetic oligonucleotide
gccactttcagaatctcgtgtcacacccatcatca

SEQ ID NO: 1181 - DNA, 36 bp, Artificial Sequence
  Synthetic oligonucleotide
gcgttccccgtggacaatatcactttcttatcgtca

SEQ ID NO: 1182 - DNA, 35 bp, Artificial Sequence
  Synthetic oligonucleotide
tcctggtctacgacttacatctgatccgacccaaa

SEQ ID NO: 1183 - DNA, 36 bp, Artificial Sequence
  Synthetic oligonucleotide
ggaccttatttgttcgacccccgttatcacctgaaa

SEQ ID NO: 1184 - DNA, 35 bp, Artificial Sequence
  Synthetic oligonucleotide
gaggacttttactgatcaaccccacctttcgaaaa

SEQ ID NO: 1185 - DNA, 36 bp, Artificial Sequence
  Synthetic oligonucleotide
gctactacttatccgactactctaaaaacaactaca

SEQ ID NO: 1186 - DNA, 35 bp, Artificial Sequence
  Synthetic oligonucleotide
aactgtcatccgccgactaactcaatctaactcaa

SEQ ID NO: 1187 - DNA, 35 bp, Artificial Sequence
  Synthetic oligonucleotide
aactgtcatccgccgactaactcaatctaactcta

SEQ ID NO: 1188 - DNA, 35 bp, Artificial Sequence
  Synthetic oligonucleotide
aactgtcatccgccgactaactcaatctaactcga

SEQ ID NO: 1189 - DNA, 35 bp, Artificial Sequence
  Synthetic oligonucleotide
tactccggcccaactatatacttctccacaccaac

SEQ ID NO: 1190 - DNA, 35 bp, Artificial Sequence
  Synthetic oligonucleotide
tactccggcccaactatatacttctccacaccatc

SEQ ID NO: 1191 - DNA, 35 bp, Artificial Sequence
  Synthetic oligonucleotide
tactccggcccaactatatacttctccacaccagc

SEQ ID NO: 1192 - DNA, 35 bp, Artificial Sequence
  Synthetic oligonucleotide
tcctacctgcccaatccccttttgattacatatat

SEQ ID NO: 1193 - DNA, 35 bp, Artificial Sequence
  Synthetic oligonucleotide
ccacgctttggggacgctattactatccctttcaa

SEQ ID NO: 1194 - DNA, 35 bp, Artificial Sequence
  Synthetic oligonucleotide
aatgtactgataatcccttttacactggttactat

SEQ ID NO: 1195 - DNA, 35 bp, Artificial Sequence
  Synthetic oligonucleotide
ttagtcgtacttttatctatattgggcctaataaa

SEQ ID NO: 1196 - DNA, 36 bp, Artificial Sequence
  Synthetic oligonucleotide
ttcgccacgttcctaaatattttacttattactaaa

SEQ ID NO: 1197 - DNA, 36 bp, Artificial Sequence
  Synthetic oligonucleotide
ttccatgactctgcctatacttattatatctcataa

SEQ ID NO: 1198 - DNA, 36 bp, Artificial Sequence
  Synthetic oligonucleotide
ttggagctacaatcaaacttcatatctctttctaaa

SEQ ID NO: 1199 - DNA, 36 bp, Artificial Sequence
  Synthetic oligonucleotide
tgcccaaaactgcctttagaaacttattacattcaa

SEQ ID NO: 1200 - DNA, 36 bp, Artificial Sequence
  Synthetic oligonucleotide
tctgcgatcgccatttatctcgaccctttacctaaa

SEQ ID NO: 1201 - DNA, 35 bp, Artificial Sequence
  Synthetic oligonucleotide
aacttttttgcactaacctggacctcatatataat

SEQ ID NO: 1202 - DNA, 34 bp, Artificial Sequence
  Synthetic oligonucleotide
aaccgcttttcacactaccactcacgctctcata

SEQ ID NO: 1203 - DNA, 36 bp, Artificial Sequence
  Synthetic oligonucleotide
ccgccgtacccacgctccaattattctcatcctaca

SEQ ID NO: 1204 - DNA, 36 bp, Artificial Sequence
  Synthetic oligonucleotide
tatctccgtccaacacatctctggtcaccacctcca

SEQ ID NO: 1205 - DNA, 35 bp, Artificial Sequence
  Synthetic oligonucleotide
tttctccgctcatcataactgacgccatccactca

SEQ ID NO: 1206 - DNA, 35 bp, Artificial Sequence
  Synthetic oligonucleotide
acttcgctcattcacttgccaactcctgcacaatc

SEQ ID NO: 1207 - DNA, 37 bp, Artificial Sequence
  Synthetic oligonucleotide
tccctcaccgttgcccttattccgtactcacttatga

SEQ ID NO: 1208 - DNA, 36 bp, Artificial Sequence
  Synthetic oligonucleotide
gtgcttctccttttgactcgcctcactcttggtcca

SEQ ID NO: 1209 - DNA, 36 bp, Artificial Sequence
  Synthetic oligonucleotide
ttttctcctcactccgctccgtgccttgacatcaaa

SEQ ID NO: 1210 - DNA, 37 bp, Artificial Sequence
  Synthetic oligonucleotide
taccttcttcaatatccgtccgcttaacctggattca

SEQ ID NO: 1211 - DNA, 36 bp, Artificial Sequence
  Synthetic oligonucleotide
cctcctctgcctaaatacgttttctccaccatcata

SEQ ID NO: 1212 - DNA, 36 bp, Artificial Sequence
  Synthetic oligonucleotide
acttttttaaattttgttcccacgtatccttaatta

SEQ ID NO: 1213 - DNA, 38 bp, Artificial Sequence
  Synthetic oligonucleotide
ttttccgggtttcttctccagtaggttgacttttatga

SEQ ID NO: 1214 - DNA, 35 bp, Artificial Sequence
  Synthetic oligonucleotide
tgttttggcctccacggtttagtacttattttttt

SEQ ID NO: 1215 - DNA, 35 bp, Artificial Sequence
  Synthetic oligonucleotide
gacttttttgctcatattttcaccaatcaattcca

SEQ ID NO: 1216 - DNA, 36 bp, Artificial Sequence
  Synthetic oligonucleotide
tgagttctcttttatattggtcgccactttttccaa

SEQ ID NO: 1217 - DNA, 36 bp, Artificial Sequence
  Synthetic oligonucleotide
ttccttcacttgggctttcaaatcatttataaacaa

SEQ ID NO: 1218 - DNA, 38 bp, Artificial Sequence
  Synthetic oligonucleotide
ttcttgacttcagttcgattttgttattcttagtttga

SEQ ID NO: 1219 - DNA, 38 bp, Artificial Sequence
  Synthetic oligonucleotide
gttaattccttgctcgagtttttccgcttattccttga

SEQ ID NO: 1220 - DNA, 37 bp, Artificial Sequence
  Synthetic oligonucleotide
ggtacatttcgtccctaccattggtttattcttttga

SEQ ID NO: 1221 - DNA, 37 bp, Artificial Sequence
  Synthetic oligonucleotide
attatttttcgttctctcacttgttttcgatcattga

SEQ ID NO: 1222 - DNA, 35 bp, Artificial Sequence
  Synthetic oligonucleotide
taattgagcttttgctcctaacggcgagagccgtt

SEQ ID NO: 1223 - DNA, 36 bp, Artificial Sequence
  Synthetic oligonucleotide
tgatatacgcgcgagtagaacatcaaccagtgagaa

SEQ ID NO: 1224 - DNA, 38 bp, Artificial Sequence
  Synthetic oligonucleotide
taagccgagcgcatgtaggttcgttttcacgagagtga

SEQ ID NO: 1225 - DNA, 35 bp, Artificial Sequence
  Synthetic oligonucleotide
atgaacgcgagtgaggacgctttagttaattatgt

SEQ ID NO: 1226 - DNA, 37 bp, Artificial Sequence
  Synthetic oligonucleotide
actcggatagcggggccgggggaggcctacacattga

SEQ ID NO: 1227 - DNA, 38 bp, Artificial Sequence
  Synthetic oligonucleotide
acgcagtccgtaaattgataaccgggaggttcgagtga

SEQ ID NO: 1228 - DNA, 35 bp, Artificial Sequence
  Synthetic oligonucleotide
agtcccacgagagtggttctctctagataagagga

SEQ ID NO: 1229 - DNA, 37 bp, Artificial Sequence
  Synthetic oligonucleotide
gagtaccataacaaggcctgaagaaccttgcaggtga

SEQ ID NO: 1230 - DNA, 38 bp, Artificial Sequence
  Synthetic oligonucleotide
gcggggtgtgaacccgctcgtatgtaacaacggattga

SEQ ID NO: 1231 - DNA, 37 bp, Artificial Sequence
  Synthetic oligonucleotide
gagtacggttacggtgagtaaccatttagacgtaaga

SEQ ID NO: 1232 - DNA, 38 bp, Artificial Sequence
  Synthetic oligonucleotide
tgggatccgcgaggatctgatggggttcttatgtttga

SEQ ID NO: 1233 - DNA, 36 bp, Artificial Sequence
  Synthetic oligonucleotide
gagtacccgggcagggagccagttattatgttttga

SEQ ID NO: 1234 - DNA, 36 bp, Artificial Sequence
  Synthetic oligonucleotide
gagtacctagatatctcaaaagatatttatcgttaa

SEQ ID NO: 1235 - DNA, 35 bp, Artificial Sequence
  Synthetic oligonucleotide
gagtactctgcgcaagtgttgaactttgtagaaat

SEQ ID NO: 1236 - DNA, 36 bp, Artificial Sequence
  Synthetic oligonucleotide
gagtacttcccgcggggttatggaatgaattggata

SEQ ID NO: 1237 - DNA, 38 bp, Artificial Sequence
  Synthetic oligonucleotide
taatgtctcttccgccgtagtacgagcggttccgctga

SEQ ID NO: 1238 - DNA, 38 bp, Artificial Sequence
  Synthetic oligonucleotide
gagtacagccgcccttgtaccgaggccttattaagtga

SEQ ID NO: 1239 - DNA, 38 bp, Artificial Sequence
  Synthetic oligonucleotide
ttagtttaccgtcaaaggcctcataatgttacaactga

SEQ ID NO: 1240 - DNA, 38 bp, Artificial Sequence
  Synthetic oligonucleotide
cgtagtattgcgggctcgtctcattgcattcctattga

SEQ ID NO: 1241 - DNA, 38 bp, Artificial Sequence
  Synthetic oligonucleotide
cgtgagacgtggttgcccaccacagtgaataaatttga

SEQ ID NO: 1242 - DNA, 37 bp, Artificial Sequence
  Synthetic oligonucleotide
gctccactatttaaccgtgagttgttaaccgggggga

SEQ ID NO: 1243 - DNA, 37 bp, Artificial Sequence
  Synthetic oligonucleotide
gctccagtaccgctgtacgaattatttaagaaaacga

SEQ ID NO: 1244 - DNA, 36 bp, Artificial Sequence
  Synthetic oligonucleotide
gcccacatttttttcgagtgtgtaaggggtgagaaa

SEQ ID NO: 1245 - DNA, 37 bp, Artificial Sequence
  Synthetic oligonucleotide
gcttattccggatgttgcctgcaattaggggactcga

SEQ ID NO: 1246 - DNA, 37 bp, Artificial Sequence
  Synthetic oligonucleotide
gcttgtctcgcggttttgaaagtaatctttaacgaga

SEQ ID NO: 1247 - DNA, 35 bp, Artificial Sequence
  Synthetic oligonucleotide
gcgcgaaagctcaaataaaactaaagtacaacaaa

SEQ ID NO: 1248 - DNA, 36 bp, Artificial Sequence
  Synthetic oligonucleotide
gctaagctgggagaaaatcacaccctcgatcgtaaa

SEQ ID NO: 1249 - DNA, 37 bp, Artificial Sequence
  Synthetic oligonucleotide
ctcacattagggctcggtaaatataacgatctgacga

SEQ ID NO: 1250 - DNA, 35 bp, Artificial Sequence
  Synthetic oligonucleotide
actgtagctattatgaaagtctgggttattggcct

SEQ ID NO: 1251 - DNA, 35 bp, Artificial Sequence
  Synthetic oligonucleotide
aatcgtatggagcgttgaacaaatgaacccgtagt

SEQ ID NO: 1252 - DNA, 38 bp, Artificial Sequence
  Synthetic oligonucleotide
agatatacttgaaaggtggtattatgaatgttgggtga

SEQ ID NO: 1253 - DNA, 38 bp, Artificial Sequence
  Synthetic oligonucleotide
atggtgactcaattaaaatgtgaggtgggggagctaga

SEQ ID NO: 1254 - DNA, 37 bp, Artificial Sequence
  Synthetic oligonucleotide
tcgtggagggtattgaccttctaatgatgggggggga

SEQ ID NO: 1255 - DNA, 38 bp, Artificial Sequence
  Synthetic oligonucleotide
ggttcctatgaaggacacggggggggaggtatcaatga

SEQ ID NO: 1256 - DNA, 37 bp, Artificial Sequence
  Synthetic oligonucleotide
aaggggcggtagactttaggggctgaatggggtggga

SEQ ID NO: 1257 - DNA, 37 bp, Artificial Sequence
  Synthetic oligonucleotide
gagtgcactggatgaattttgaggggggaaggaccga

SEQ ID NO: 1258 - DNA, 37 bp, Artificial Sequence
  Synthetic oligonucleotide
tgcggtgggtggtgggtgggaaataattatgtgggga

SEQ ID NO: 1259 - DNA, 37 bp, Artificial Sequence
  Synthetic oligonucleotide
taccagactggaagtcaatgatcatggttgtctccga

SEQ ID NO: 1260 - DNA, 36 bp, Artificial Sequence
  Synthetic oligonucleotide
aacggtacaacatctgctagagaactgcaacttcta

SEQ ID NO: 1261 - DNA, 36 bp, Artificial Sequence
  Synthetic oligonucleotide
actatatccaatgctatgcgcgcattcagggtagaa

SEQ ID NO: 1262 - DNA, 35 bp, Artificial Sequence
  Synthetic oligonucleotide
agcatcggccgatcgcctcaatcacgttttcgatt

SEQ ID NO: 1263 - DNA, 38 bp, Artificial Sequence
  Synthetic oligonucleotide
aggcttacaatacgttaccccttcttcgtagacggtga

SEQ ID NO: 1264 - DNA, 36 bp, Artificial Sequence
  Synthetic oligonucleotide
cttgacgtcacatttgcctaacactgtaggtcacaa

SEQ ID NO: 1265 - DNA, 35 bp, Artificial Sequence
  Synthetic oligonucleotide
tctggtagcacatgagtttggcattcctctctgca

SEQ ID NO: 1266 - DNA, 35 bp, Artificial Sequence
  Synthetic oligonucleotide
tgttgtccgtatatattccttgtgtgttaattccg

SEQ ID NO: 1267 - DNA, 35 bp, Artificial Sequence
  Synthetic oligonucleotide
gagcactataagtgtgtatctatttgtaactttct

SEQ ID NO: 1268 - DNA, 35 bp, Artificial Sequence
  Synthetic oligonucleotide
tgtggaggcactcttgtatgattgatttcgtatct

SEQ ID NO: 1269 - DNA, 36 bp, Artificial Sequence
  Synthetic oligonucleotide
aatctaacgcatcaaatacgtttgggtagtcattaa

SEQ ID NO: 1270 - DNA, 35 bp, Artificial Sequence
  Synthetic oligonucleotide
tggtcaacgttatcgtatcctactgatcactaact

SEQ ID NO: 1271 - DNA, 36 bp, Artificial Sequence
  Synthetic oligonucleotide
ttgtcgcaccacatcataggtgccacgatgtcccaa

SEQ ID NO: 1272 - DNA, 36 bp, Artificial Sequence
  Synthetic oligonucleotide
actgttacaacagaagggttagatcacatactacaa

SEQ ID NO: 1273 - DNA, 35 bp, Artificial Sequence
  Synthetic oligonucleotide
actcgagggaactaggaactactacaacagtgtgt

SEQ ID NO: 1274 - DNA, 38 bp, Artificial Sequence
  Synthetic oligonucleotide
ccatgaaactacaacatatcaagtcgagtgtggtgtga

SEQ ID NO: 1275 - DNA, 37 bp, Artificial Sequence
  Synthetic oligonucleotide
cggccgacgtagctcaaattctacactatggttgtga

SEQ ID NO: 1276 - DNA, 38 bp, Artificial Sequence
  Synthetic oligonucleotide
ggcagtactatcaacttacatgccaatattcgatgtga

SEQ ID NO: 1277 - DNA, 36 bp, Artificial Sequence
  Synthetic oligonucleotide
gctaccagcgttgcagtctgcggattctgtcaaata

SEQ ID NO: 1278 - DNA, 35 bp, Artificial Sequence
  Synthetic oligonucleotide
cttactcaaagtggcgtgtaggtcattaggttgta

SEQ ID NO: 1279 - DNA, 36 bp, Artificial Sequence
  Synthetic oligonucleotide
cgtagtactagcaacattagggtcgtaacataacta

SEQ ID NO: 1280 - DNA, 36 bp, Artificial Sequence
  Synthetic oligonucleotide
acgaccgtggggttagggcgcatattctttggctta

SEQ ID NO: 1281 - DNA, 37 bp, Artificial Sequence
  Synthetic oligonucleotide
tactctcatgggtatctttctgaatcgaacgttgtga

SEQ ID NO: 1282 - DNA, 35 bp, Artificial Sequence
  Synthetic oligonucleotide
gcggtttaacctcgaaagtaagggcgattaggcga

SEQ ID NO: 1283 - DNA, 35 bp, Artificial Sequence
  Synthetic oligonucleotide
gcgggttcaaattgaggaggaaagacgaaagctct

SEQ ID NO: 1284 - DNA, 38 bp, Artificial Sequence
  Synthetic oligonucleotide
gatcgaatcgatactgcagcggagtgacacgggtctaa

SEQ ID NO: 1285 - DNA, 35 bp, Artificial Sequence
  Synthetic oligonucleotide
tagtccgggtcgttttaaattcagtttggcatttt

SEQ ID NO: 1286 - DNA, 35 bp, Artificial Sequence
  Synthetic oligonucleotide
aaccaggcatagttggccgcaggcaaccccatttt

SEQ ID NO: 1287 - DNA, 35 bp, Artificial Sequence
  Synthetic oligonucleotide
agtccaaacacgaggttccgtcgcgagaactttaa

SEQ ID NO: 1288 - DNA, 37 bp, Artificial Sequence
  Synthetic oligonucleotide
agtccggcaaggggcgcaacttatcatagtcctctga

SEQ ID NO: 1289 - DNA, 35 bp, Artificial Sequence
  Synthetic oligonucleotide
taggctcccgcctttagcttagtttcagatagcaa

SEQ ID NO: 1290 - DNA, 35 bp, Artificial Sequence
  Synthetic oligonucleotide
cgcggtattttgcctcaaactagtcgttaatctat

SEQ ID NO: 1291 - DNA, 37 bp, Artificial Sequence
  Synthetic oligonucleotide
ttacttcgggagctaggctcacccctacattagtgga

SEQ ID NO: 1292 - DNA, 37 bp, Artificial Sequence
  Synthetic oligonucleotide
agtgcaattggatatatcagtgaggagtttcaattga

SEQ ID NO: 1293 - DNA, 37 bp, Artificial Sequence
  Synthetic oligonucleotide
ccgaaatcggggtagattatggggtcctggaaatcga

SEQ ID NO: 1294 - DNA, 38 bp, Artificial Sequence
  Synthetic oligonucleotide
taagtttgtagaatttaacgtatggaacggggacgtga

SEQ ID NO: 1295 - DNA, 35 bp, Artificial Sequence
  Synthetic oligonucleotide
tgagcgagcgcctgatattcggtactgcatatctc

SEQ ID NO: 1296 - DNA, 36 bp, Artificial Sequence
  Synthetic oligonucleotide
gatcgaattaggggaattcgttggaatcgacccata

SEQ ID NO: 1297 - DNA, 38 bp, Artificial Sequence
  Synthetic oligonucleotide
tctgtgcgaagggtttagtctcgggcgaaacttaatga

SEQ ID NO: 1298 - DNA, 38 bp, Artificial Sequence
  Synthetic oligonucleotide
agggaagtcctagttggagtgattttccgtgattctga

SEQ ID NO: 1299 - DNA, 38 bp, Artificial Sequence
  Synthetic oligonucleotide
aggaatggctagtctaagacaaactcctctgtttatga

SEQ ID NO: 1300 - DNA, 37 bp, Artificial Sequence
  Synthetic oligonucleotide
gattgtcacggatgattctggatttatataggtacga

SEQ ID NO: 1301 - DNA, 38 bp, Artificial Sequence
  Synthetic oligonucleotide
attcatgggagcttgaccggagttattgtttgttgtga

SEQ ID NO: 1302 - DNA, 35 bp, Artificial Sequence
  Synthetic oligonucleotide
tatcgaacttagatgtgacactgttttttagtcta

SEQ ID NO: 1303 - DNA, 37 bp, Artificial Sequence
  Synthetic oligonucleotide
agctacggcttatcgttggggtccaagttcatgaaga

SEQ ID NO: 1304 - DNA, 37 bp, Artificial Sequence
  Synthetic oligonucleotide
agtctaccccccaaattgttggtattccgagcataga

SEQ ID NO: 1305 - DNA, 35 bp, Artificial Sequence
  Synthetic oligonucleotide
tcgtcccaagctctggactggtaagttcttatgta

SEQ ID NO: 1306 - DNA, 36 bp, Artificial Sequence
  Synthetic oligonucleotide
tgctacagttcaacctcacgtttttgaactgcgtga

SEQ ID NO: 1307 - DNA, 37 bp, Artificial Sequence
  Synthetic oligonucleotide
cgtttggacgggggtgtccttttttttgatattacga

SEQ ID NO: 1308 - DNA, 37 bp, Artificial Sequence
  Synthetic oligonucleotide
ttcctcgtgttacaggcactttattagcctgtgggga

SEQ ID NO: 1309 - DNA, 36 bp, Artificial Sequence
  Synthetic oligonucleotide
cttggcccgttgaccacgacataatggtcttatata

SEQ ID NO: 1310 - DNA, 36 bp, Artificial Sequence
  Synthetic oligonucleotide
aggatatttaccctgcatcttttcgttacggtatga

SEQ ID NO: 1311 - DNA, 36 bp, Artificial Sequence
  Synthetic oligonucleotide
actgtctggaagtcggaactttcaccattatgatga

SEQ ID NO: 1312 - DNA, 38 bp, Artificial Sequence
  Synthetic oligonucleotide
gaatggaggaactttctcgtattcacgttttgttgtga

SEQ ID NO: 1313 - DNA, 38 bp, Artificial Sequence
  Synthetic oligonucleotide
aaccgttagtgcaaaggggagtacggcctttgttttga

SEQ ID NO: 1314 - DNA, 38 bp, Artificial Sequence
  Synthetic oligonucleotide
ctcgtacgcaaacgctttgaatagaacgtttgtcttga

SEQ ID NO: 1315 - DNA, 37 bp, Artificial Sequence
  Synthetic oligonucleotide
agatacccggtggttatcttaagggtgtgacttttga

SEQ ID NO: 1316 - DNA, 38 bp, Artificial Sequence
  Synthetic oligonucleotide
tagggttcagtatctggcgattctgttgatgttcctga

SEQ ID NO: 1317 - DNA, 38 bp, Artificial Sequence
  Synthetic oligonucleotide
cgagctcccttaagggtgcatcgggattcattgtttga

SEQ ID NO: 1318 - DNA, 38 bp, Artificial Sequence
  Synthetic oligonucleotide
cacatccggagaaggtgcgtttatacatgaatttctga

SEQ ID NO: 1319 - DNA, 38 bp, Artificial Sequence
  Synthetic oligonucleotide
aaggacgacgcggaacaatctgtagctatgactcttga

SEQ ID NO: 1320 - DNA, 37 bp, Artificial Sequence
  Synthetic oligonucleotide
acttgttcctgaagtgggtttgacttgcaaacgttga

SEQ ID NO: 1321 - DNA, 37 bp, Artificial Sequence
  Synthetic oligonucleotide
agtacacgcccgttggtttcgttcggaaattacttga

SEQ ID NO: 1322 - DNA, 37 bp, Artificial Sequence
  Synthetic oligonucleotide
tgaacatctttgttattcaacgggatcacgcaacgga

SEQ ID NO: 1323 - DNA, 36 bp, Artificial Sequence
  Synthetic oligonucleotide
taatccgatgcaatttgtatttactgacaatgcgta

SEQ ID NO: 1324 - DNA, 36 bp, Artificial Sequence
  Synthetic oligonucleotide
aactggaggatcccggaatttatcctcccatacgaa

SEQ ID NO: 1325 - DNA, 37 bp, Artificial Sequence
  Synthetic oligonucleotide
gaattgcggactgacagatagatgcggtgacattgga

SEQ ID NO: 1326 - DNA, 35 bp, Artificial Sequence
  Synthetic oligonucleotide
tcgcactagttctatgagggaaactacaggaacga

SEQ ID NO: 1327 - DNA, 37 bp, Artificial Sequence
  Synthetic oligonucleotide
gattgacctggaaggcaatagctggtcaacgactgga

SEQ ID NO: 1328 - DNA, 37 bp, Artificial Sequence
  Synthetic oligonucleotide
gcagtacggcacgagggatactctgccctatatatga

SEQ ID NO: 1329 - DNA, 37 bp, Artificial Sequence
  Synthetic oligonucleotide
gccatcatggatatatgcacgtatggtgcttttagga

SEQ ID NO: 1330 - DNA, 38 bp, Artificial Sequence
  Synthetic oligonucleotide
tgcgaaactctagatgattatgattaaacttgtactga

SEQ ID NO: 1331 - DNA, 37 bp, Artificial Sequence
  Synthetic oligonucleotide
aactgaccccattgggtcacccgtgatagttatcgga

SEQ ID NO: 1332 - DNA, 38 bp, Artificial Sequence
  Synthetic oligonucleotide
gtactgctctaggagaaaataaccgtatgaaacgatga

SEQ ID NO: 1333 - DNA, 38 bp, Artificial Sequence
  Synthetic oligonucleotide
ttgcgtatttgccttagaacgcaataaagcatttgtga

SEQ ID NO: 1334 - DNA, 38 bp, Artificial Sequence
  Synthetic oligonucleotide
atctacactggaactgacagggggtagtagtatcctga

SEQ ID NO: 1335 - DNA, 38 bp, Artificial Sequence
  Synthetic oligonucleotide
tagggattgaatctcctctaacattcgacaacaggtga

SEQ ID NO: 1336 - DNA, 38 bp, Artificial Sequence
  Synthetic oligonucleotide
agcgttcaacgcggttgagtgggtgccgaactatatga

SEQ ID NO: 1337 - DNA, 38 bp, Artificial Sequence
  Synthetic oligonucleotide
ggacctgatgccatttagtgtggataatgttattgtga

SEQ ID NO: 1338 - DNA, 35 bp, Artificial Sequence
  Synthetic oligonucleotide
tgatatctaggaaccatgcggtaatggtccgagta

SEQ ID NO: 1339 - DNA, 37 bp, Artificial Sequence
  Synthetic oligonucleotide
tgaaagccgtgactggtattaacggcaaataacggga

SEQ ID NO: 1340 - DNA, 36 bp, Artificial Sequence
  Synthetic oligonucleotide
tgcatgatacgggcttcaaggagcttcttattcgta

SEQ ID NO: 1341 - DNA, 37 bp, Artificial Sequence
  Synthetic oligonucleotide
agacacattgtgtgcaacatggaagtggtctttagga

SEQ ID NO: 1342 - DNA, 38 bp, Artificial Sequence
  Synthetic oligonucleotide
gagttgctctatgtacttcctgagggggtatgtgatga

SEQ ID NO: 1343 - DNA, 37 bp, Artificial Sequence
  Synthetic oligonucleotide
cctgttatctatacttgcgtgagcaaattactttaga

SEQ ID NO: 1344 - DNA, 38 bp, Artificial Sequence
  Synthetic oligonucleotide
tggagtacgcgtgcgttacagtccgaataaggctttga

SEQ ID NO: 1345 - DNA, 38 bp, Artificial Sequence
  Synthetic oligonucleotide
cacagtcaggcgtaatgagaatgagcactttggtttga

SEQ ID NO: 1346 - DNA, 36 bp, Artificial Sequence
  Synthetic oligonucleotide
tcatttacgtgagtaacctggcttagtatcggagta

SEQ ID NO: 1347 - DNA, 38 bp, Artificial Sequence
  Synthetic oligonucleotide
gatggaacgtagcgaaaccgggtttacgcgtgatctga

SEQ ID NO: 1348 - DNA, 37 bp, Artificial Sequence
  Synthetic oligonucleotide
taattatcgtcgtgagatcgatactacggttgtgcga

SEQ ID NO: 1349 - DNA, 35 bp, Artificial Sequence
  Synthetic oligonucleotide
gaggactggcattaccgtggtcagctaaactagac

SEQ ID NO: 1350 - DNA, 37 bp, Artificial Sequence
  Synthetic oligonucleotide
tgcagcatacctaattgttcaccgttgggaaaggtga

SEQ ID NO: 1351 - DNA, 36 bp, Artificial Sequence
  Synthetic oligonucleotide
agctttgtaatacgtgagtttgggtaggtcatcgta

SEQ ID NO: 1352 - DNA, 35 bp, Artificial Sequence
  Synthetic oligonucleotide
cctgcgtcctaaacggataacgaaaacgaatactc

SEQ ID NO: 1353 - DNA, 35 bp, Artificial Sequence
  Synthetic oligonucleotide
ccctgcacgaacgaaccggaataaatcgatggtga

SEQ ID NO: 1354 - DNA, 36 bp, Artificial Sequence
  Synthetic oligonucleotide
gcgcttttctcaaccgacgaccatcgaatagaagaa

SEQ ID NO: 1355 - DNA, 36 bp, Artificial Sequence
  Synthetic oligonucleotide
ttaggctaaggaacgggacccattcgatgaaaatca

SEQ ID NO: 1356 - DNA, 36 bp, Artificial Sequence
  Synthetic oligonucleotide
tcggagtttgcaatccggcaattattagattacaca

SEQ ID NO: 1357 - DNA, 35 bp, Artificial Sequence
  Synthetic oligonucleotide
accggaaatgaaccgtcgcttattccacgaattag

SEQ ID NO: 1358 - DNA, 35 bp, Artificial Sequence
  Synthetic oligonucleotide
gagaattgcggtaaatttcggggcaatatcctctc

SEQ ID NO: 1359 - DNA, 36 bp, Artificial Sequence
  Synthetic oligonucleotide
acgccccgaatgatcggtgggctgtattttacaata

SEQ ID NO: 1360 - DNA, 37 bp, Artificial Sequence
  Synthetic oligonucleotide
gagtagtgggctcacgggggcagtatatcggatacga

SEQ ID NO: 1361 - DNA, 36 bp, Artificial Sequence
  Synthetic oligonucleotide
gagtgcgatggcgtccacggggatttttcggaataa

SEQ ID NO: 1362 - DNA, 36 bp, Artificial Sequence
  Synthetic oligonucleotide
accacgtacaaggaagttaggattcggggaccgtga

SEQ ID NO: 1363 - DNA, 35 bp, Artificial Sequence
  Synthetic oligonucleotide
gaaagctcaagctaatgagaatacgatcatacacc

SEQ ID NO: 1364 - DNA, 36 bp, Artificial Sequence
  Synthetic oligonucleotide
aggacgacgaatttactctaggggtgggctggttaa

SEQ ID NO: 1365 - DNA, 37 bp, Artificial Sequence
  Synthetic oligonucleotide
gtacactggtgtgattgttgtggtggagttggtaaga

SEQ ID NO: 1366 - DNA, 36 bp, Artificial Sequence
  Synthetic oligonucleotide
gggtagtacggggagcactgggctagattgtgacta

SEQ ID NO: 1367 - DNA, 35 bp, Artificial Sequence
  Synthetic oligonucleotide
ggtggaacgggggttgggattgtaagggagtatgt

SEQ ID NO: 1368 - DNA, 37 bp, Artificial Sequence
  Synthetic oligonucleotide
acggtaaaaagggcaatgcttggcgtctatcagacga

SEQ ID NO: 1369 - DNA, 35 bp, Artificial Sequence
  Synthetic oligonucleotide
gtgtggaccggctagtaaaggctgttggggtaatt

SEQ ID NO: 1370 - DNA, 35 bp, Artificial Sequence
  Synthetic oligonucleotide
gcctatcggtggatagtttggtcattcattggagc

SEQ ID NO: 1371 - DNA, 37 bp, Artificial Sequence
  Synthetic oligonucleotide
actctccatgggtggggctcccgaaagaatttctaga

SEQ ID NO: 1372 - DNA, 37 bp, Artificial Sequence
  Synthetic oligonucleotide
ttaaagccatcaaaatctatctaaagttgtagaagga

SEQ ID NO: 1373 - DNA, 37 bp, Artificial Sequence
  Synthetic oligonucleotide
gtctacataatttgtatacggtttaaaatctcgagga

SEQ ID NO: 1374 - DNA, 38 bp, Artificial Sequence
  Synthetic oligonucleotide
tctcggagtagaatccaccagaatcacaggaattctga

SEQ ID NO: 1375 - DNA, 35 bp, Artificial Sequence
  Synthetic oligonucleotide
gaaaggtgccaatcgccggtacacaatttaggaaa

SEQ ID NO: 1376 - DNA, 35 bp, Artificial Sequence
  Synthetic oligonucleotide
cataaacaccttatgaatttatgtagaaatcgaaa

SEQ ID NO: 1377 - DNA, 34 bp, Artificial Sequence
  Synthetic oligonucleotide
gaaccgaagtagtagatttaattatacataatgt

SEQ ID NO: 1378 - DNA, 36 bp, Artificial Sequence
  Synthetic oligonucleotide
gccgcaatacaaacgagaggcttctcccgattaata

SEQ ID NO: 1379 - DNA, 35 bp, Artificial Sequence
  Synthetic oligonucleotide
acctgcggaatatcgtgagaattgaaaaaagcaaa

SEQ ID NO: 1380 - DNA, 38 bp, Artificial Sequence
  Synthetic oligonucleotide
taggcgaatcgaaaaaaagtaatcattatgggttgtga

SEQ ID NO: 1381 - DNA, 37 bp, Artificial Sequence
  Synthetic oligonucleotide
ataccggaccaaggacgccggggtactaaggactcga

SEQ ID NO: 1382 - DNA, 37 bp, Artificial Sequence
  Synthetic oligonucleotide
cgcataatagtcgacgtttttttttgtcggattcgga

SEQ ID NO: 1383 - DNA, 38 bp, Artificial Sequence
  Synthetic oligonucleotide
acaggaaggccaaagtttttccaaggtcgattgcctga

SEQ ID NO: 1384 - DNA, 36 bp, Artificial Sequence
  Synthetic oligonucleotide
gaaatcgtttggtaatttagttcggaacccagggta

SEQ ID NO: 1385 - DNA, 35 bp, Artificial Sequence
  Synthetic oligonucleotide
aaaacgtctcatgcggcctttcgagggcatatctc

SEQ ID NO: 1386 - DNA, 38 bp, Artificial Sequence
  Synthetic oligonucleotide
aaggttcgagaattctcactgcagatcatccgtcatga

SEQ ID NO: 1387 - DNA, 35 bp, Artificial Sequence
  Synthetic oligonucleotide
agtgctctctcttgggggtagtcatccagaatagt

SEQ ID NO: 1388 - DNA, 35 bp, Artificial Sequence
  Synthetic oligonucleotide
taagtcccaatttatttgaagacgttgtaatcgtc

SEQ ID NO: 1389 - DNA, 36 bp, Artificial Sequence
  Synthetic oligonucleotide
aaaacaggctaaaaaggtacatccccattttgctta

SEQ ID NO: 1390 - DNA, 37 bp, Artificial Sequence
  Synthetic oligonucleotide
gtgcgcaaggtttagcgcatacgtagttgaataccga

SEQ ID NO: 1391 - DNA, 37 bp, Artificial Sequence
  Synthetic oligonucleotide
ttccaagtacccaggtttagacctgggacgatagcga

SEQ ID NO: 1392 - DNA, 35 bp, Artificial Sequence
  Synthetic oligonucleotide
tttccaccaaccctgatttgaaaaagacacgcaaa

SEQ ID NO: 1393 - DNA, 35 bp, Artificial Sequence
  Synthetic oligonucleotide
ctccgcccaacgagagttctacgtaaagatcaaac

SEQ ID NO: 1394 - DNA, 37 bp, Artificial Sequence
  Synthetic oligonucleotide
tgtcccgcgcttgacatcatcctaagattaaagaaga

SEQ ID NO: 1395 - DNA, 35 bp, Artificial Sequence
  Synthetic oligonucleotide
attaccgttaatttaaagtacccacgggttgttgg

SEQ ID NO: 1396 - DNA, 37 bp, Artificial Sequence
  Synthetic oligonucleotide
gcatcgtggaaagattctcttataatcaattggggga

SEQ ID NO: 1397 - DNA, 35 bp, Artificial Sequence
  Synthetic oligonucleotide
acacacacggggtagatcacataggcaaacgcttg

SEQ ID NO: 1398 - DNA, 36 bp, Artificial Sequence
  Synthetic oligonucleotide
acaaacgtactaagggcgaagccttttactcgcgca

SEQ ID NO: 1399 - DNA, 38 bp, Artificial Sequence
  Synthetic oligonucleotide
cgtgcaaaccgctgtaagcattcaaaccaactggatga

SEQ ID NO: 1400 - DNA, 35 bp, Artificial Sequence
  Synthetic oligonucleotide
acacaaacacaatctaggagttaaatacagttgga

SEQ ID NO: 1401 - DNA, 35 bp, Artificial Sequence
  Synthetic oligonucleotide
actttcacgatgttgggggggcccaattacagatg

SEQ ID NO: 1402 - DNA, 35 bp, Artificial Sequence
  Synthetic oligonucleotide
acgtttagattaagttcgcttatgaatgtgggatt

SEQ ID NO: 1403 - DNA, 37 bp, Artificial Sequence
  Synthetic oligonucleotide
attgccgttgatgttcgtgattttattaagtggggga

SEQ ID NO: 1404 - DNA, 37 bp, Artificial Sequence
  Synthetic oligonucleotide
gttcttaggcctgttgttaccaggattttcgtgtaga

SEQ ID NO: 1405 - DNA, 36 bp, Artificial Sequence
  Synthetic oligonucleotide
agtccggatacctgtttgtatgcgaaagggaattta

SEQ ID NO: 1406 - DNA, 35 bp, Artificial Sequence
  Synthetic oligonucleotide
gttaatgtcaatctgaaccgacgtgagtattcggc

SEQ ID NO: 1407 - DNA, 37 bp, Artificial Sequence
  Synthetic oligonucleotide
accacggttgggttgcggctaacgtatagccgatgga

SEQ ID NO: 1408 - DNA, 36 bp, Artificial Sequence
  Synthetic oligonucleotide
gtgccttggttgtaattggactttatggctacctaa

SEQ ID NO: 1409 - DNA, 38 bp, Artificial Sequence
  Synthetic oligonucleotide
gatttgcgagtgtgaaacgaattatagcacacgtctga

SEQ ID NO: 1410 - DNA, 35 bp, Artificial Sequence
  Synthetic oligonucleotide
atgctggtgaaccaaactcaagcatgacatttaag

SEQ ID NO: 1411 - DNA, 36 bp, Artificial Sequence
  Synthetic oligonucleotide
cctgcccacgaattgtatatgtaattgcactatcga

SEQ ID NO: 1412 - DNA, 35 bp, Artificial Sequence
  Synthetic oligonucleotide
tctgcaggacttttgattcgtgggttcaacctcat

SEQ ID NO: 1413 - DNA, 37 bp, Artificial Sequence
  Synthetic oligonucleotide
gcacattatgtcacgtagaggcacagtcggtaatcga

SEQ ID NO: 1414 - DNA, 36 bp, Artificial Sequence
  Synthetic oligonucleotide
gggctacgttatcccattcaattcgaattaaatgta

SEQ ID NO: 1415 - DNA, 36 bp, Artificial Sequence
  Synthetic oligonucleotide
acattgccgaattaattcgttgtcgaggaaagacaa

SEQ ID NO: 1416 - DNA, 35 bp, Artificial Sequence
  Synthetic oligonucleotide
cccacgtgttacgggttttatcatgacatcactat

SEQ ID NO: 1417 - DNA, 35 bp, Artificial Sequence
  Synthetic oligonucleotide
catgcacgttttattgtggaaatgtaagcttgggc

SEQ ID NO: 1418 - DNA, 37 bp, Artificial Sequence
  Synthetic oligonucleotide
tgcaagggaaatacgttcctgtgttgtttcgatgaga

SEQ ID NO: 1419 - DNA, 35 bp, Artificial Sequence
  Synthetic oligonucleotide
tgggcagtctctatttgtcattacggttttatgtc

SEQ ID NO: 1420 - DNA, 38 bp, Artificial Sequence
  Synthetic oligonucleotide
agcaggcaacagtatcagccctatttgtcgtaaaatga

SEQ ID NO: 1421 - DNA, 38 bp, Artificial Sequence
  Synthetic oligonucleotide
ggctacgggaaagatgtcacgtctgtttcatttgatga

SEQ ID NO: 1422 - DNA, 35 bp, Artificial Sequence
  Synthetic oligonucleotide
actacgttttaatttcagtaacccatccgatgctc

SEQ ID NO: 1423 - DNA, 36 bp, Artificial Sequence
  Synthetic oligonucleotide
aacaaacgccaaccatatggtaggattcctctttta

SEQ ID NO: 1424 - DNA, 36 bp, Artificial Sequence
  Synthetic oligonucleotide
tgataaccatcggtacctcaccgctcccaactctta

SEQ ID NO: 1425 - DNA, 36 bp, Artificial Sequence
  Synthetic oligonucleotide
cgaaccgacgaaatttccacaccgctttgtatgtta

SEQ ID NO: 1426 - DNA, 35 bp, Artificial Sequence
  Synthetic oligonucleotide
tacctcatgtttgtcactatggaaatcatcccgac

SEQ ID NO: 1427 - DNA, 36 bp, Artificial Sequence
  Synthetic oligonucleotide
agttatttctcgccacataacactctatggaaacta

SEQ ID NO: 1428 - DNA, 36 bp, Artificial Sequence
  Synthetic oligonucleotide
atctcggatttcccgtaggtcactggcacatttcta

SEQ ID NO: 1429 - DNA, 37 bp, Artificial Sequence
  Synthetic oligonucleotide
aattttccgctgggacgaatttctaaccctatttgga

SEQ ID NO: 1430 - DNA, 35 bp, Artificial Sequence
  Synthetic oligonucleotide
gaagcaccgaatcacctggcatggccctttatcta

SEQ ID NO: 1431 - DNA, 35 bp, Artificial Sequence
  Synthetic oligonucleotide
actgccgacgcacaacttgggtggggctctaattt

SEQ ID NO: 1432 - DNA, 35 bp, Artificial Sequence
  Synthetic oligonucleotide
ttcgctgacctcaccggacatatcatttaaagcta

SEQ ID NO: 1433 - DNA, 35 bp, Artificial Sequence
  Synthetic oligonucleotide
tcccttattatgcgaaacaaatatgtagttcttac

SEQ ID NO: 1434 - DNA, 35 bp, Artificial Sequence
  Synthetic oligonucleotide
tctaaaactcacgctaggtggtacaaccgattcta

SEQ ID NO: 1435 - DNA, 36 bp, Artificial Sequence
  Synthetic oligonucleotide
gtagccaacgaagctcgcgtattctatttgccctta

SEQ ID NO: 1436 - DNA, 36 bp, Artificial Sequence
  Synthetic oligonucleotide
acctcaccaagtccttaaggattctgtattcataaa

SEQ ID NO: 1437 - DNA, 35 bp, Artificial Sequence
  Synthetic oligonucleotide
agaatctggctattgatccccacacattgcgaaaa

SEQ ID NO: 1438 - DNA, 35 bp, Artificial Sequence
  Synthetic oligonucleotide
acctaccaatctagatccgcttttatggattgctc

SEQ ID NO: 1439 - DNA, 35 bp, Artificial Sequence
  Synthetic oligonucleotide
gacttctaaacacatggggtgcccgcaacatattt

SEQ ID NO: 1440 - DNA, 38 bp, Artificial Sequence
  Synthetic oligonucleotide
tccagaacgtcagctctccatacgcaattaattcatga

SEQ ID NO: 1441 - DNA, 35 bp, Artificial Sequence
  Synthetic oligonucleotide
gacggccttataaggcactcctcattcatttaata

SEQ ID NO: 1442 - DNA, 38 bp, Artificial Sequence
  Synthetic oligonucleotide
gggacctgcaagcctatcaacgggttatacatttgtga

SEQ ID NO: 1443 - DNA, 36 bp, Artificial Sequence
  Synthetic oligonucleotide
tacacttccatttgatgcgctcaccttgaatctgta

SEQ ID NO: 1444 - DNA, 36 bp, Artificial Sequence
  Synthetic oligonucleotide
aatcgaactcattactttccaatggacctgggagaa

SEQ ID NO: 1445 - DNA, 36 bp, Artificial Sequence
  Synthetic oligonucleotide
agtttacgagttacactacaacggacgaatctttta

SEQ ID NO: 1446 - DNA, 35 bp, Artificial Sequence
  Synthetic oligonucleotide
aacttttctggctttatacacatacggttgccatt

SEQ ID NO: 1447 - DNA, 36 bp, Artificial Sequence
  Synthetic oligonucleotide
agaactgggccttggaatcacacacctaactagtta

SEQ ID NO: 1448 - DNA, 36 bp, Artificial Sequence
  Synthetic oligonucleotide
attcgcactaataacatgttgctccattcaacctaa

SEQ ID NO: 1449 - DNA, 35 bp, Artificial Sequence
  Synthetic oligonucleotide
tatctgctgttttctctggtgccaataactacatc

SEQ ID NO: 1450 - DNA, 37 bp, Artificial Sequence
  Synthetic oligonucleotide
ttgcacataattttctgctttaaccaagcgaacccga

SEQ ID NO: 1451 - DNA, 35 bp, Artificial Sequence
  Synthetic oligonucleotide
taaaattctgaaaatacacgtgtctttcgcattac

SEQ ID NO: 1452 - DNA, 35 bp, Artificial Sequence
  Synthetic oligonucleotide
tcccgaacacatcccccttttaagggctttgctaa

SEQ ID NO: 1453 - DNA, 38 bp, Artificial Sequence
  Synthetic oligonucleotide
aaccacacggggctctcatcgatacttctagtgattga

SEQ ID NO: 1454 - DNA, 35 bp, Artificial Sequence
  Synthetic oligonucleotide
atctagaattccgtttgcgcgagtaacttccctgt

SEQ ID NO: 1455 - DNA, 36 bp, Artificial Sequence
  Synthetic oligonucleotide
cccgcttatcgctagtacctcatttagaattggaaa

SEQ ID NO: 1456 - DNA, 36 bp, Artificial Sequence
  Synthetic oligonucleotide
acctgtaaatttggctcacttttcctttacactgga

SEQ ID NO: 1457 - DNA, 35 bp, Artificial Sequence
  Synthetic oligonucleotide
aatagtatcacacctatctggcttcctgtacccgt

SEQ ID NO: 1458 - DNA, 38 bp, Artificial Sequence
  Synthetic oligonucleotide
acccacccttgagcaccattaaatagtgatttcgctga

SEQ ID NO: 1459 - DNA, 37 bp, Artificial Sequence
  Synthetic oligonucleotide
tcacgaaccctttagctctattttgtttgacgcatga

SEQ ID NO: 1460 - DNA, 37 bp, Artificial Sequence
  Synthetic oligonucleotide
gaggaacgtttctcccctcaacatttaaataaacaga

SEQ ID NO: 1461 - DNA, 35 bp, Artificial Sequence
  Synthetic oligonucleotide
atcctacgcataattctcgaggatctatttcgaaa

SEQ ID NO: 1462 - DNA, 36 bp, Artificial Sequence
  Synthetic oligonucleotide
tgcccgcaattacccctagatccacagcttggttta

SEQ ID NO: 1463 - DNA, 38 bp, Artificial Sequence
  Synthetic oligonucleotide
ggctcttatacaaaacattgggttctcgacctccctga

SEQ ID NO: 1464 - DNA, 36 bp, Artificial Sequence
  Synthetic oligonucleotide
gtgagctgctaatatttatcctgaacttgcttacga

SEQ ID NO: 1465 - DNA, 35 bp, Artificial Sequence
  Synthetic oligonucleotide
agttaccttacaacgaggtttcttgaatggattct

SEQ ID NO: 1466 - DNA, 35 bp, Artificial Sequence
  Synthetic oligonucleotide
ttacaccatccctacgcggtaatagcaactctgtt

SEQ ID NO: 1467 - DNA, 36 bp, Artificial Sequence
  Synthetic oligonucleotide
gcaccacgcacctgtggggattccctaatgtcttta

SEQ ID NO: 1468 - DNA, 35 bp, Artificial Sequence
  Synthetic oligonucleotide
ctatcggactaatacacgtaaaaataactctggtt

SEQ ID NO: 1469 - DNA, 35 bp, Artificial Sequence
  Synthetic oligonucleotide
ggcgtacttatcacaaacggtggaaccacacttct

SEQ ID NO: 1470 - DNA, 37 bp, Artificial Sequence
  Synthetic oligonucleotide
tattcttatccaacccacgaaatcaattgtattttga

SEQ ID NO: 1471 - DNA, 35 bp, Artificial Sequence
  Synthetic oligonucleotide
agatccgaatccgtaactccaaaatatttatgcac

SEQ ID NO: 1472 - DNA, 38 bp, Artificial Sequence
  Synthetic oligonucleotide
actatagaacaatccaccgctttaaatcaactatctta

SEQ ID NO: 1473 - DNA, 35 bp, Artificial Sequence
  Synthetic oligonucleotide
gccgttcttctgcgacgaacacatcctcccttaat

SEQ ID NO: 1474 - DNA, 35 bp, Artificial Sequence
  Synthetic oligonucleotide
gcgcgaggcccgcgggctcatcacttttgttatct

SEQ ID NO: 1475 - DNA, 38 bp, Artificial Sequence
  Synthetic oligonucleotide
tacccctgacaatcctcgcgccgaggcctccatcctga

SEQ ID NO: 1476 - DNA, 36 bp, Artificial Sequence
  Synthetic oligonucleotide
ttcggtctaatttttagcggccaaattttcttatca

SEQ ID NO: 1477 - DNA, 36 bp, Artificial Sequence
  Synthetic oligonucleotide
gattttaaaacccttgcacctgattgtgccaatcca

SEQ ID NO: 1478 - DNA, 35 bp, Artificial Sequence
  Synthetic oligonucleotide
gcgcgaggcccgcgggctcatcacttttgttatat

SEQ ID NO: 1479 - DNA, 35 bp, Artificial Sequence
  Synthetic oligonucleotide
gccgttcttctgcgacgaacacatcctcccttact

SEQ ID NO: 1480 - DNA, 36 bp, Artificial Sequence
  Synthetic oligonucleotide
tgctcggccctattaacacgtgccgtgtcttgttca

SEQ ID NO: 1481 - DNA, 38 bp, Artificial Sequence
  Synthetic oligonucleotide
tcgcgccgaccgtattacaccaactctatggactctaa

SEQ ID NO: 1482 - DNA, 36 bp, Artificial Sequence
  Synthetic oligonucleotide
aacccaattcacatacactctcacccccactaaaca

SEQ ID NO: 1483 - DNA, 35 bp, Artificial Sequence
  Synthetic oligonucleotide
gccgttcttctgcgacgaacacatcctcccttatt

SEQ ID NO: 1484 - DNA, 35 bp, Artificial Sequence
  Synthetic oligonucleotide
gcgcgaggcccgcgggctcatcacttttgttatgt

SEQ ID NO: 1485 - DNA, 38 bp, Artificial Sequence
  Synthetic oligonucleotide
tacccctgacaatcctcgcgccgaggcctccatcctca

SEQ ID NO: 1486 - DNA, 36 bp, Artificial Sequence
  Synthetic oligonucleotide
ttccgcgcaaacgaatgactctttgttgaaaaacga

SEQ ID NO: 1487 - DNA, 36 bp, Artificial Sequence
  Synthetic oligonucleotide
gcgtagtggctgcttggcgtttccgcatactaggca

SEQ ID NO: 1488 - DNA, 37 bp, Artificial Sequence
  Synthetic oligonucleotide
aaacctcggctaaccgccaagggtagtgtcccccgca

SEQ ID NO: 1489 - DNA, 38 bp, Artificial Sequence
  Synthetic oligonucleotide
atgagacgtagcaacactcgagacccttggagcactca

SEQ ID NO: 1490 - DNA, 36 bp, Artificial Sequence
  Synthetic oligonucleotide
agctgccagggttcgggaccttaacggatgtcccaa

SEQ ID NO: 1491 - DNA, 37 bp, Artificial Sequence
  Synthetic oligonucleotide
tcacgagcttccactacgtctatccgcgtagacggaa

SEQ ID NO: 1492 - DNA, 37 bp, Artificial Sequence
  Synthetic oligonucleotide
gatcgacgattcgatcatccaacgtatttacaccaga

SEQ ID NO: 1493 - DNA, 36 bp, Artificial Sequence
  Synthetic oligonucleotide
gcagccggcgaccgggatgtcgtcgggacttgctta

SEQ ID NO: 1494 - DNA, 38 bp, Artificial Sequence
  Synthetic oligonucleotide
atgaaccatggttacacctctaatgtagcctcatgtca

SEQ ID NO: 1495 - DNA, 37 bp, Artificial Sequence
  Synthetic oligonucleotide
ccaccggtacttattattcgccatccacacccagtta

SEQ ID NO: 1496 - DNA, 35 bp, Artificial Sequence
  Synthetic oligonucleotide
tagttacgccactactctgtgggagaaacccgaga

SEQ ID NO: 1497 - DNA, 38 bp, Artificial Sequence
  Synthetic oligonucleotide
atccacccaaaatcgatataagtgcgcccccaatctaa

SEQ ID NO: 1498 - DNA, 35 bp, Artificial Sequence
  Synthetic oligonucleotide
aggggggaaagtcatcgggtggctgtactacttca

SEQ ID NO: 1499 - DNA, 37 bp, Artificial Sequence
  Synthetic oligonucleotide
gggggtcgtactcccgagatttgcgttacggtgaaca

SEQ ID NO: 1500 - DNA, 37 bp, Artificial Sequence
  Synthetic oligonucleotide
gagtatcctctggtcgttcggtacagaaacggtgtaa

SEQ ID NO: 1501 - DNA, 37 bp, Artificial Sequence
  Synthetic oligonucleotide
acatggcctttaaatctacggagtactgttgggggga

SEQ ID NO: 1502 - DNA, 36 bp, Artificial Sequence
  Synthetic oligonucleotide
gcgtagtggctgcttggcgtttccgcatactaggaa

SEQ ID NO: 1503 - DNA, 36 bp, Artificial Sequence
  Synthetic oligonucleotide
tccgataccgaacttcactccgtgggcggggttgaa

SEQ ID NO: 1504 - DNA, 38 bp, Artificial Sequence
  Synthetic oligonucleotide
gcagtgttatttctcttggtttctttgatttcacttaa

SEQ ID NO: 1505 - DNA, 38 bp, Artificial Sequence
  Synthetic oligonucleotide
acatccagatacccttgacttaagattgtgaccactaa

SEQ ID NO: 1506 - DNA, 37 bp, Artificial Sequence
  Synthetic oligonucleotide
acaggttctgcgaccagaaagttaggactaacctaga

SEQ ID NO: 1507 - DNA, 38 bp, Artificial Sequence
  Synthetic oligonucleotide
gcagtgttatttctcttggtttctttgatttcacttca

SEQ ID NO: 1508 - DNA, 37 bp, Artificial Sequence
  Synthetic oligonucleotide
ccgcagttttgttcccgggggaatccggactgaacga

SEQ ID NO: 1509 - DNA, 37 bp, Artificial Sequence
  Synthetic oligonucleotide
aggtccggttcctatggactgcctgaccccgcgaaga

SEQ ID NO: 1510 - DNA, 35 bp, Artificial Sequence
  Synthetic oligonucleotide
ttgtaacgatttgggagtccagagactcgctgttt

SEQ ID NO: 1511 - DNA, 37 bp, Artificial Sequence
  Synthetic oligonucleotide
tttgatttaagtactcccgcgttcctccgaataccca

SEQ ID NO: 1512 - DNA, 38 bp, Artificial Sequence
  Synthetic oligonucleotide
gcagagcgcacgtgtactcaatgggttgttaattttaa

SEQ ID NO: 1513 - DNA, 36 bp, Artificial Sequence
  Synthetic oligonucleotide
gaactctgtattattcctgtcattagccgttggtaa

SEQ ID NO: 1514 - DNA, 38 bp, Artificial Sequence
  Synthetic oligonucleotide
gaggccctaccgtgtattttgataatggatttgtttaa

SEQ ID NO: 1515 - DNA, 38 bp, Artificial Sequence
  Synthetic oligonucleotide
tgtaatcacgggtgcgaactcgagagaatttgtgctaa

SEQ ID NO: 1516 - DNA, 38 bp, Artificial Sequence
  Synthetic oligonucleotide
ggccggtagtccacgctttcgcgagatagtgactgtga

SEQ ID NO: 1517 - DNA, 36 bp, Artificial Sequence
  Synthetic oligonucleotide
aggtcctcagaacttgtgcgtgagcaaagaatgaag

SEQ ID NO: 1518 - DNA, 38 bp, Artificial Sequence
  Synthetic oligonucleotide
gagtatctgggttcgagagcgcatttgcccgctgttga

SEQ ID NO: 1519 - DNA, 35 bp, Artificial Sequence
  Synthetic oligonucleotide
gtattaatcttcgctgtgggagagcgattacgcca

SEQ ID NO: 1520 - DNA, 36 bp, Artificial Sequence
  Synthetic oligonucleotide
tatccttggatcaccgatcgatgcgagaggtagtaa

SEQ ID NO: 1521 - DNA, 38 bp, Artificial Sequence
  Synthetic oligonucleotide
ttttctacgtgacggagagtccagatcgaagacaaaga

SEQ ID NO: 1522 - DNA, 36 bp, Artificial Sequence
  Synthetic oligonucleotide
acaatgcatcgtagcgggtctcggagctcgccttaa

SEQ ID NO: 1523 - DNA, 37 bp, Artificial Sequence
  Synthetic oligonucleotide
tacaaagaacggaagctattcaaaaacacacggagga

SEQ ID NO: 1524 - DNA, 35 bp, Artificial Sequence
  Synthetic oligonucleotide
ggacgaccggatatagtaaagtccccggcttctgt

SEQ ID NO: 1525 - DNA, 37 bp, Artificial Sequence
  Synthetic oligonucleotide
agccatcatgttggcacggtcctttgataccattgga

SEQ ID NO: 1526 - DNA, 36 bp, Artificial Sequence
  Synthetic oligonucleotide
attaccgtcaacgggtcctgggctccatacgaggca

SEQ ID NO: 1527 - DNA, 35 bp, Artificial Sequence
  Synthetic oligonucleotide
ctgctttaggtgtggtcgcactcaaatgtgaatgg

SEQ ID NO: 1528 - DNA, 36 bp, Artificial Sequence
  Synthetic oligonucleotide
gcggggtaagaactcgatgaggtgagtggatttgta

SEQ ID NO: 1529 - DNA, 35 bp, Artificial Sequence
  Synthetic oligonucleotide
aagggattggaacttggatgttttcagttggcgca

SEQ ID NO: 1530 - DNA, 38 bp, Artificial Sequence
  Synthetic oligonucleotide
tgcctcggctagcatcacaatagatggtttgcacttga

SEQ ID NO: 1531 - DNA, 38 bp, Artificial Sequence
  Synthetic oligonucleotide
gagacgaaggcaccttttcgacgcgataagctcgttga

SEQ ID NO: 1532 - DNA, 36 bp, Artificial Sequence
  Synthetic oligonucleotide
accgcgaggtcttttggaacagggcatatgaatcca

SEQ ID NO: 1533 - DNA, 37 bp, Artificial Sequence
  Synthetic oligonucleotide
acgtgaaactaccgagcggtgcttttcgctgtagcga

SEQ ID NO: 1534 - DNA, 37 bp, Artificial Sequence
  Synthetic oligonucleotide
caacgcctgactactgtagagtgaacgctggtggtga

SEQ ID NO: 1535 - DNA, 38 bp, Artificial Sequence
  Synthetic oligonucleotide
gcgaaggtttgggtaaaaggaaatagactttgttgtga

SEQ ID NO: 1536 - DNA, 36 bp, Artificial Sequence
  Synthetic oligonucleotide
acaagtcgctgctcagcttcctagggcagtactcaa

SEQ ID NO: 1537 - DNA, 36 bp, Artificial Sequence
  Synthetic oligonucleotide
aaacgggatctgtcgcgagtacagtgttgcccagta

SEQ ID NO: 1538 - DNA, 36 bp, Artificial Sequence
  Synthetic oligonucleotide
taaaggaacagcgattcgggctgttattttaggtga

SEQ ID NO: 1539 - DNA, 36 bp, Artificial Sequence
  Synthetic oligonucleotide
tgtgggattattgtagttgtagtaaggtgaccggca

SEQ ID NO: 1540 - DNA, 36 bp, Artificial Sequence
  Synthetic oligonucleotide
cgctaaccggaactaggttgcaaagctatggtggta

SEQ ID NO: 1541 - DNA, 36 bp, Artificial Sequence
  Synthetic oligonucleotide
cccttaggttccagtgaagttatgcaacttcatgta

SEQ ID NO: 1542 - DNA, 37 bp, Artificial Sequence
  Synthetic oligonucleotide
ctattccagcttttttgatcccgcttttgagagttga

SEQ ID NO: 1543 - DNA, 38 bp, Artificial Sequence
  Synthetic oligonucleotide
acaggacgtgcgcgctaacgttctattagttgtgctga

SEQ ID NO: 1544 - DNA, 36 bp, Artificial Sequence
  Synthetic oligonucleotide
gagtttcgttttatgtgttggctttatttccctcga

SEQ ID NO: 1545 - DNA, 36 bp, Artificial Sequence
  Synthetic oligonucleotide
tggcgttgtagccacgtccctccgctagtagagaaa

SEQ ID NO: 1546 - DNA, 35 bp, Artificial Sequence
  Synthetic oligonucleotide
tcgtagtactggtcttaatttgttgtagtcctaag

SEQ ID NO: 1547 - DNA, 36 bp, Artificial Sequence
  Synthetic oligonucleotide
tccacacgcggcgagctacgcgactaaaatcacgta

SEQ ID NO: 1548 - DNA, 38 bp, Artificial Sequence
  Synthetic oligonucleotide
tatcaaattcggtcgtagtatttgtcgccgtaacgtga

SEQ ID NO: 1549 - DNA, 36 bp, Artificial Sequence
  Synthetic oligonucleotide
gctacgaagtccaaacgtacgcacctgtttggagta

SEQ ID NO: 1550 - DNA, 35 bp, Artificial Sequence
  Synthetic oligonucleotide
tccgggcaccatatctccactgtgcgaatcactat

SEQ ID NO: 1551 - DNA, 35 bp, Artificial Sequence
  Synthetic oligonucleotide
tccgggcaccatatctccactgtgcgaatcactct

SEQ ID NO: 1552 - DNA, 38 bp, Artificial Sequence; identical to SEQ ID NO: 1543
  Synthetic oligonucleotide

SEQ ID NO: 1553 - DNA, 36 bp, Artificial Sequence
  Synthetic oligonucleotide
agcaaacgatgggccatcattcacgcttggtattaa

SEQ ID NO: 1554 - DNA, 38 bp, Artificial Sequence
  Synthetic oligonucleotide
agggacgtgatatttcaatgctgaatatacacacctga

SEQ ID NO: 1555 - DNA, 37 bp, Artificial Sequence
  Synthetic oligonucleotide
agtgattctcacttgttcccggggttcaaagatctga

SEQ ID NO: 1556 - DNA, 36 bp, Artificial Sequence
  Synthetic oligonucleotide
atcaagggaggatttttcggtcggcctagggacaca

SEQ ID NO: 1557 - DNA, 35 bp, Artificial Sequence
  Synthetic oligonucleotide
atacgcggcctaataataagatcgtcataccccaa

SEQ ID NO: 1558 - DNA, 35 bp, Artificial Sequence
  Synthetic oligonucleotide
atctcacgataaagctaacggtgagagtatctact

SEQ ID NO: 1559 - DNA, 37 bp, Artificial Sequence
  Synthetic oligonucleotide
ccgccggcgatgggggatcgcttattttattgttcga

SEQ ID NO: 1560 - DNA, 36 bp, Artificial Sequence
  Synthetic oligonucleotide
cgggtacgttggatcgacaccgaccatcttgacgta

SEQ ID NO: 1561 - DNA, 36 bp, Artificial Sequence; identical to SEQ ID NO: 1540
  Synthetic oligonucleotide

SEQ ID NO: 1562 - DNA, 38 bp, Artificial Sequence
  Synthetic oligonucleotide
cgagtgctgcgcgggttccttggggtgctccaatttga

SEQ ID NO: 1563 - DNA, 35 bp, Artificial Sequence
  Synthetic oligonucleotide
cgtgtaacccgcccaattccatcgtcacgaaattt

SEQ ID NO: 1564 - DNA, 37 bp, Artificial Sequence; identical to SEQ ID NO: 1542
  Synthetic oligonucleotide

SEQ ID NO: 1565 - DNA, 38 bp, Artificial Sequence
  Synthetic oligonucleotide
cctcgaacctgcgcgggagaaggcgcttgctaatctga

SEQ ID NO: 1566 - DNA, 38 bp, Artificial Sequence
  Synthetic oligonucleotide
cttggtccctgctcggttgaatgacgcaatgagtgtga

SEQ ID NO: 1567 - DNA, 38 bp, Artificial Sequence
  Synthetic oligonucleotide
ctcgtaggactgaggtcgatagttatttcacaccgtga

SEQ ID NO: 1568 - DNA, 38 bp, Artificial Sequence
  Synthetic oligonucleotide
gacacgacgtatctccttattccctgctataagtttga

SEQ ID NO: 1569 - DNA, 36 bp, Artificial Sequence
  Synthetic oligonucleotide
gacgttcttgcaccgcgaggtctgcagcaattctaa

SEQ ID NO: 1570 - DNA, 35 bp, Artificial Sequence
  Synthetic oligonucleotide
gcaactattgggccgtattcgtccacggggcttgt

SEQ ID NO: 1571 - DNA, 38 bp, Artificial Sequence
  Synthetic oligonucleotide
gcgtagggttggttatgcatcaattttccgctaattga

SEQ ID NO: 1572 - DNA, 36 bp, Artificial Sequence
  Synthetic oligonucleotide
gccttcggggtttattaagttattacggatctagta

SEQ ID NO: 1573 - DNA, 37 bp, Artificial Sequence
  Synthetic oligonucleotide
gcgcgtgagctgcaccgacatcacgccgattctctga

SEQ ID NO: 1574 - DNA, 36 bp, Artificial Sequence; identical to SEQ ID NO: 1549
  Synthetic oligonucleotide

SEQ ID NO: 1575 - DNA, 36 bp, Artificial Sequence
  Synthetic oligonucleotide
ggtcactcgtaggtctcccgcatcgagaaagccgta

SEQ ID NO: 1576 - DNA, 38 bp, Artificial Sequence
  Synthetic oligonucleotide
gtggatggcactaatatccccttctcgttaaagtgtga

SEQ ID NO: 1577 - DNA, 35 bp, Artificial Sequence
  Synthetic oligonucleotide
gtccaccgggattcgtatgggtatttttacccacc

SEQ ID NO: 1578 - DNA, 38 bp, Artificial Sequence
  Synthetic oligonucleotide
gttacggtatgcgaggtctcacgttgcgatcattttga

SEQ ID NO: 1579 - DNA, 37 bp, Artificial Sequence
  Synthetic oligonucleotide
gttcatcgttcctatgtcactatttccctactgctga

SEQ ID NO: 1580 - DNA, 37 bp, Artificial Sequence
  Synthetic oligonucleotide
tactaggggccgtgagccttgtgccccaagtagccga

SEQ ID NO: 1581 - DNA, 38 bp, Artificial Sequence; identical to SEQ ID NO: 1548
  Synthetic oligonucleotide

SEQ ID NO: 1582 - DNA, 36 bp, Artificial Sequence; identical to SEQ ID NO: 1547
  Synthetic oligonucleotide

SEQ ID NO: 1583 - DNA, 35 bp, Artificial Sequence; identical to SEQ ID NO: 1546
  Synthetic oligonucleotide

SEQ ID NO: 1584 - DNA, 37 bp, Artificial Sequence
  Synthetic oligonucleotide
tcgtgcgctcggttctacgccactgtacgagacacga

SEQ ID NO: 1585 - DNA, 35 bp, Artificial Sequence
  Synthetic oligonucleotide
tgtacgaaccgggcctaggatagttgctacatgta

SEQ ID NO: 1586 - DNA, 36 bp, Artificial Sequence
  Synthetic oligonucleotide
ataatgccagatctttggtttatcttgcgcttggta

SEQ ID NO: 1587 - DNA, 37 bp, Artificial Sequence
  Synthetic oligonucleotide
ccattagctgagtttcggtggacgcatgatagtttga

SEQ ID NO: 1588 - DNA, 35 bp, Artificial Sequence
  Synthetic oligonucleotide
actccatgggccccccggtttggaccccgggttta

SEQ ID NO: 1589 - DNA, 36 bp, Artificial Sequence
  Synthetic oligonucleotide
gaaaatctggcgacttagttttcgtttgatccctta

SEQ ID NO: 1590 - DNA, 36 bp, Artificial Sequence
  Synthetic oligonucleotide
agctcatggacgcactggtggcagtgcgactactaa

SEQ ID NO: 1591 - DNA, 35 bp, Artificial Sequence
  Synthetic oligonucleotide
aggataactggtttttatctctgctaattcactcg

SEQ ID NO: 1592 - DNA, 38 bp, Artificial Sequence
  Synthetic oligonucleotide
cgtggcctgtttggagacgtactgtgtcaggcatttga

SEQ ID NO: 1593 - DNA, 36 bp, Artificial Sequence
  Synthetic oligonucleotide
accttgggatcctgtttagaccgaatcggtgcgcta

SEQ ID NO: 1594 - DNA, 35 bp, Artificial Sequence
  Synthetic oligonucleotide
atcgtagtcatagacccggctttggtttccgggta

SEQ ID NO: 1595 - DNA, 37 bp, Artificial Sequence
  Synthetic oligonucleotide
gacctgggctgtctttactttgtttcgcggggctgga

SEQ ID NO: 1596 - DNA, 38 bp, Artificial Sequence
  Synthetic oligonucleotide
ccttgagccgccgggtttcggtccttattcgtgaatga

SEQ ID NO: 1597 - DNA, 35 bp, Artificial Sequence
  Synthetic oligonucleotide
agatcttttcggttattggggggaaccgagacgta

SEQ ID NO: 1598 - DNA, 36 bp, Artificial Sequence
  Synthetic oligonucleotide
gtgcgttggttaccgatggaggggacccgtagacta

SEQ ID NO: 1599 - DNA, 35 bp, Artificial Sequence
  Synthetic oligonucleotide
ttttattggctcgtttcctataatatgttgaatcc

SEQ ID NO: 1600 - DNA, 35 bp, Artificial Sequence
  Synthetic oligonucleotide
gcctcgacgacagtgacctacatcgctcgtttcgt

SEQ ID NO: 1601 - DNA, 38 bp, Artificial Sequence
  Synthetic oligonucleotide
ggtctggggggattcctacggttccaacagcataatga

SEQ ID NO: 1602 - DNA, 36 bp, Artificial Sequence
  Synthetic oligonucleotide
gttgccttgtaccccatagctggtaaggtcctagta

SEQ ID NO: 1603 - DNA, 36 bp, Artificial Sequence
  Synthetic oligonucleotide
gttgttcgggcgtcgcaacacggtcccattgtctta

SEQ ID NO: 1604 - DNA, 36 bp, Artificial Sequence
  Synthetic oligonucleotide
tcgttatagcctatatacacgcggttgactcgctga

SEQ ID NO: 1605 - DNA, 35 bp, Artificial Sequence
  Synthetic oligonucleotide
ttgtagctgctattgttttctcgattgagaactta

SEQ ID NO: 1606 - DNA, 35 bp, Artificial Sequence
  Synthetic oligonucleotide
ggctcttggtttagcccttattgtttatcattcat

SEQ ID NO: 1607 - DNA, 35 bp, Artificial Sequence
  Synthetic oligonucleotide
taattggcccgtttccaaatttatagattcctaca

SEQ ID NO: 1608 - DNA, 38 bp, Artificial Sequence
  Synthetic oligonucleotide
tccgacccatatcgacgatactggcgtggcgctactga

SEQ ID NO: 1609 - DNA, 38 bp, Artificial Sequence
  Synthetic oligonucleotide
tgcgtgagtaacgcacaggggaacactccgttttgtga

SEQ ID NO: 1610 - DNA, 36 bp, Artificial Sequence
  Synthetic oligonucleotide
gctggtatagctgggtttctatcgtttattctcgta

SEQ ID NO: 1611 - DNA, 36 bp, Artificial Sequence
  Synthetic oligonucleotide
tttgcttcatttgcacttcccccgttattccgctca

SEQ ID NO: 1612 - DNA, 38 bp, Artificial Sequence
  Synthetic oligonucleotide
aatttttactgcgtggaaaggattcgggaatttgttga

SEQ ID NO: 1613 - DNA, 36 bp, Artificial Sequence; identical to SEQ ID NO: 1593
  Synthetic oligonucleotide

SEQ ID NO: 1614 - DNA, 35 bp, Artificial Sequence; identical to SEQ ID NO: 1591
  Synthetic oligonucleotide

SEQ ID NO: 1615 - DNA, 36 bp, Artificial Sequence; identical to SEQ ID NO: 1590
  Synthetic oligonucleotide

SEQ ID NO: 1616 - DNA, 36 bp, Artificial Sequence
  Synthetic oligonucleotide
aggagtacgcgttcatccagacacggaatactttga

SEQ ID NO: 1617 - DNA, 36 bp, Artificial Sequence
  Synthetic oligonucleotide
agccttacgccatgccgagagagcgctttgtttcga

SEQ ID NO: 1618 - DNA, 35 bp, Artificial Sequence
  Synthetic oligonucleotide
agggcttagtttcctgattttactacagctcgctc

SEQ ID NO: 1619 - DNA, 36 bp, Artificial Sequence; identical to SEQ ID NO: 1586
  Synthetic oligonucleotide

SEQ ID NO: 1620 - DNA, 35 bp, Artificial Sequence
  Synthetic oligonucleotide
agtcctgatgctcaatgcgcgagtttcattgagct

SEQ ID NO: 1621 - DNA, 35 bp, Artificial Sequence; identical to SEQ ID NO: 1594
  Synthetic oligonucleotide

SEQ ID NO: 1622 - DNA, 37 bp, Artificial Sequence; identical to SEQ ID NO: 1587
  Synthetic oligonucleotide

SEQ ID NO: 1623 - DNA, 35 bp, Artificial Sequence
  Synthetic oligonucleotide
cgtaagccggtttcagcccacctggagattcttca

SEQ ID NO: 1624 - DNA, 38 bp, Artificial Sequence; identical to SEQ ID NO: 1596
  Synthetic oligonucleotide

SEQ ID NO: 1625 - DNA, 36 bp, Artificial Sequence
  Synthetic oligonucleotide
cgtagttactcgtcatggggtctttgttatgtggta

SEQ ID NO: 1626 - DNA, 36 bp, Artificial Sequence; identical to SEQ ID NO: 1589
  Synthetic oligonucleotide

SEQ ID NO: 1627 - DNA, 37 bp, Artificial Sequence; identical to SEQ ID NO: 1595
  Synthetic oligonucleotide

SEQ ID NO: 1628 - DNA, 37 bp, Artificial Sequence
  Synthetic oligonucleotide
gagtccccttctttgatgctggggtgagctcctccga

SEQ ID NO: 1629 - DNA, 37 bp, Artificial Sequence
  Synthetic oligonucleotide
gatgatcgcgcctttcgtttgtgacggttaccaggga

SEQ ID NO: 1630 - DNA, 35 bp, Artificial Sequence; identical to SEQ ID NO: 1600
  Synthetic oligonucleotide

SEQ ID NO: 1631 - DNA, 38 bp, Artificial Sequence
  Synthetic oligonucleotide
ggcccccgctccctagtttgagcgccctccacgattga

SEQ ID NO: 1632 - DNA, 35 bp, Artificial Sequence; identical to SEQ ID NO: 1606
  Synthetic oligonucleotide

SEQ ID NO: 1633 - DNA, 38 bp, Artificial Sequence; identical to SEQ ID NO: 1601
  Synthetic oligonucleotide

SEQ ID NO: 1634 - DNA, 36 bp, Artificial Sequence; identical to SEQ ID NO: 1602
  Synthetic oligonucleotide

SEQ ID NO: 1635 - DNA, 36 bp, Artificial Sequence; identical to SEQ ID NO: 1603
  Synthetic oligonucleotide

SEQ ID NO: 1636 - DNA, 38 bp, Artificial Sequence
  Synthetic oligonucleotide
tactggggaagctccgggcgcttggtttcgccacctga

SEQ ID NO: 1637 - DNA, 35 bp, Artificial Sequence
  Synthetic oligonucleotide
tcatttcggactgttctaacgcgagttatgaaggg

SEQ ID NO: 1638 - DNA, 36 bp, Artificial Sequence
  Synthetic oligonucleotide
tcacccgacggcaacaagggcatttgcttcatagta

SEQ ID NO: 1639 - DNA, 37 bp, Artificial Sequence
  Synthetic oligonucleotide
tcgaggggaattgtccacatgcatggtttcataagga

SEQ ID NO: 1640 - DNA, 38 bp, Artificial Sequence; identical to SEQ ID NO: 1608
  Synthetic oligonucleotide

SEQ ID NO: 1641 - DNA, 38 bp, Artificial Sequence; identical to SEQ ID NO: 1609
  Synthetic oligonucleotide

SEQ ID NO: 1642 - DNA, 38 bp, Artificial Sequence
  Synthetic oligonucleotide
tgttcttactaggcttagcagcctgttcccgttattga

SEQ ID NO: 1643 - DNA, 37 bp, Artificial Sequence
  Synthetic oligonucleotide
tgttttcagaccagagtaggaattccgagggcggtta

SEQ ID NO: 1644 - DNA, 35 bp, Artificial Sequence
  Synthetic oligonucleotide
tgttttgctgcttagagcgtaatcgtattggctct

SEQ ID NO: 1645 - DNA, 37 bp, Artificial Sequence
  Synthetic oligonucleotide
ttcctaggatgaaacagaaacaccgattggtccagga

SEQ ID NO: 1646 - DNA, 37 bp, Artificial Sequence
  Synthetic oligonucleotide
ttccggttttgggcgactccgtttgcgcccacgctga

SEQ ID NO: 1647 - DNA, 35 bp, Artificial Sequence
  Synthetic oligonucleotide
tttgcaagttcgctacgtatatccactgtgaagcc

SEQ ID NO: 1648 - DNA, 35 bp, Artificial Sequence; identical to SEQ ID NO: 1605
  Synthetic oligonucleotide

SEQ ID NO: 1649 - DNA, 37 bp, Artificial Sequence
  Synthetic oligonucleotide
ttttgttaaacaacgccggcaagggtcgttgttacga

SEQ ID NO: 1650 - DNA, 37 bp, Artificial Sequence
  Synthetic oligonucleotide
ttttcgcattaaaaacgggtgtccaccggttggtgga

SEQ ID NO: 1651 - DNA, 36 bp, Artificial Sequence
  Synthetic oligonucleotide
cgcgcgagcaactacactaacggaaaacccgttcaa

SEQ ID NO: 1652 - DNA, 36 bp, Artificial Sequence
  Synthetic oligonucleotide
ctactcgccgcaacccaacactcagtcaaacgatca

SEQ ID NO: 1653 - DNA, 38 bp, Artificial Sequence
  Synthetic oligonucleotide
ataacgcacgtttccataactcataccactggccttga

SEQ ID NO: 1654 - DNA, 35 bp, Artificial Sequence
  Synthetic oligonucleotide
gagagaagtatttgttaagccacatagttttcttg

SEQ ID NO: 1655 - DNA, 36 bp, Artificial Sequence
  Synthetic oligonucleotide
ccttactgcatggtttggtaccgctattgtccccca

SEQ ID NO: 1656 - DNA, 37 bp, Artificial Sequence
  Synthetic oligonucleotide
aaaattatgcgccttagggaagacatacggcctgtga

SEQ ID NO: 1657 - DNA, 37 bp, Artificial Sequence
  Synthetic oligonucleotide
aatgatcggacttgcaggctcaaccctactgatggga

SEQ ID NO: 1658 - DNA, 35 bp, Artificial Sequence
  Synthetic oligonucleotide
aaggcacgtacacactatcacctggggtgtgcctc

SEQ ID NO: 1659 - DNA, 35 bp, Artificial Sequence
  Synthetic oligonucleotide
aatagattaaagtgaacgtgagtgtttccatatta

SEQ ID NO: 1660 - DNA, 38 bp, Artificial Sequence
  Synthetic oligonucleotide
aattcgtcactcgttgtgtgtagccggtgcccaattga

SEQ ID NO: 1661 - DNA, 36 bp, Artificial Sequence
  Synthetic oligonucleotide
acgggagatcctttaagtacgtcgaagccagcaata

SEQ ID NO: 1662 - DNA, 37 bp, Artificial Sequence
  Synthetic oligonucleotide
actccgttacgtgttggcgctttcagttcagcacgga

SEQ ID NO: 1663 - DNA, 35 bp, Artificial Sequence
  Synthetic oligonucleotide
agacagtggacttctcgtcgaaaatgcatctctat

SEQ ID NO: 1664 - DNA, 37 bp, Artificial Sequence
  Synthetic oligonucleotide
agagaacgttgcccttgagtgtttcttgagccttgga

SEQ ID NO: 1665 - DNA, 36 bp, Artificial Sequence
  Synthetic oligonucleotide
agcgtgtatcatcactgatttagttatcccgagcta

SEQ ID NO: 1666 - DNA, 36 bp, Artificial Sequence
  Synthetic oligonucleotide
agaggccagcttagtgtggccaccgtgagtttacta

SEQ ID NO: 1667 - DNA, 35 bp, Artificial Sequence
  Synthetic oligonucleotide
atatgtatacgaaccctcctaatcgcactatcagt

SEQ ID NO: 1668 - DNA, 38 bp, Artificial Sequence; identical to SEQ ID NO: 1653
  Synthetic oligonucleotide

SEQ ID NO: 1669 - DNA, 36 bp, Artificial Sequence
  Synthetic oligonucleotide
agtacctatcaaggattttgccgaatccgtgccgca

SEQ ID NO: 1670 - DNA, 35 bp, Artificial Sequence
  Synthetic oligonucleotide
agttcactctaacttccgtgccgaaggcgttatcc

SEQ ID NO: 1671 - DNA, 35 bp, Artificial Sequence
  Synthetic oligonucleotide
cacatcgactgcgcgatcaatattagggtggacat

SEQ ID NO: 1672 - DNA, 35 bp, Artificial Sequence
  Synthetic oligonucleotide
attgcattcttcaggacgcttcgcccgggattctt

SEQ ID NO: 1673 - DNA, 35 bp, Artificial Sequence
  Synthetic oligonucleotide
catccctgacgcgagttggaacatgagtacgtact

SEQ ID NO: 1674 - DNA, 36 bp, Artificial Sequence
  Synthetic oligonucleotide
caccgcttagtcttatttagggtcgctaatctggta

SEQ ID NO: 1675 - DNA, 36 bp, Artificial Sequence
  Synthetic oligonucleotide
caaaccgctgcaaaaggatccccgttatggctacat

SEQ ID NO: 1676 - DNA, 38 bp, Artificial Sequence
  Synthetic oligonucleotide
ccggaccattaggtcttcttgttcaaatactttgatga

SEQ ID NO: 1677 - DNA, 36 bp, Artificial Sequence
  Synthetic oligonucleotide
ccgagcttcgtttgggttcatttcgtccgattcgca

SEQ ID NO: 1678 - DNA, 38 bp, Artificial Sequence
  Synthetic oligonucleotide
cctcctattacagttccccgggaatgaatagcaactga

SEQ ID NO: 1679 - DNA, 38 bp, Artificial Sequence
  Synthetic oligonucleotide
cgcctataccgcactcgcttggaacgacacaaagctga

SEQ ID NO: 1680 - DNA, 38 bp, Artificial Sequence
  Synthetic oligonucleotide
cgtggattcgcccacatgatgatggccggtatgtttga

SEQ ID NO: 1681 - DNA, 37 bp, Artificial Sequence
  Synthetic oligonucleotide
ccttttgtaggacgccctttctgcgcatccggtagga

SEQ ID NO: 1682 - DNA, 37 bp, Artificial Sequence
  Synthetic oligonucleotide
ccttaactacacgagagcatgtcaaggggtaaatgga

SEQ ID NO: 1683 - DNA, 36 bp, Artificial Sequence; identical to SEQ ID NO: 1652
  Synthetic oligonucleotide

SEQ ID NO: 1684 - DNA, 38 bp, Artificial Sequence; identical to SEQ ID NO: 1562
  Synthetic oligonucleotide

SEQ ID NO: 1685 - DNA, 36 bp, Artificial Sequence
  Synthetic oligonucleotide
cggagtacgaagccgcttagattacctagcccgtta

SEQ ID NO: 1686 - DNA, 37 bp, Artificial Sequence
  Synthetic oligonucleotide
cgagcgacgtttgtttcaaaaatcactgggaatatga

SEQ ID NO: 1687 - DNA, 35 bp, Artificial Sequence
  Synthetic oligonucleotide
ctacatcgctctccgtaatcgggcgattcatttca

SEQ ID NO: 1688 - DNA, 38 bp, Artificial Sequence
  Synthetic oligonucleotide
gaaaacgttggaagtttttacgccgctctcagccgtga

SEQ ID NO: 1689 - DNA, 35 bp, Artificial Sequence
  Synthetic oligonucleotide
gaatttatgcaatccattaggaaaatgggtgtgcg

SEQ ID NO: 1690 - DNA, 36 bp, Artificial Sequence
  Synthetic oligonucleotide
ctgacagtcttccctggtctattgtccgcagatcga

SEQ ID NO: 1691 - DNA, 38 bp, Artificial Sequence; identical to SEQ ID NO: 1566
  Synthetic oligonucleotide

SEQ ID NO: 1692 - DNA, 36 bp, Artificial Sequence
  Synthetic oligonucleotide
gagggactgcacagcggtgatattctaaatgtacga

SEQ ID NO: 1693 - DNA, 38 bp, Artificial Sequence
  Synthetic oligonucleotide
gaccgggtaggcttctaggcgcccccctccttacttga

SEQ ID NO: 1694 - DNA, 35 bp, Artificial Sequence
  Synthetic oligonucleotide
gaccaaagtatgtgtggtattgatatgccgtgaac

SEQ ID NO: 1695 - DNA, 36 bp, Artificial Sequence
  Synthetic oligonucleotide
gagaaccgtgctcaaggcagaattgtcaccgctcga

SEQ ID NO: 1696 - DNA, 38 bp, Artificial Sequence
  Synthetic oligonucleotide
gacgagtgacttgcactacgaaggccctcgtcgcctga

SEQ ID NO: 1697 - DNA, 37 bp, Artificial Sequence
  Synthetic oligonucleotide
gagtttgtcttgccccgggtcgggacgttgtatccta

SEQ ID NO: 1698 - DNA, 35 bp, Artificial Sequence
  Synthetic oligonucleotide
gagtggcttactttcattggatccgtgagccttgc

SEQ ID NO: 1699 - DNA, 37 bp, Artificial Sequence
  Synthetic oligonucleotide
gcaatacgctagataggcttagaaacggaatacacga

SEQ ID NO: 1700 - DNA, 35 bp, Artificial Sequence
  Synthetic oligonucleotide
gatgtcgtcacggaagtacatatggcgctgtagcc

SEQ ID NO: 1701 - DNA, 35 bp, Artificial Sequence
  Synthetic oligonucleotide
gccactggatttaactgcatcccgtctctgaggct

SEQ ID NO: 1702 - DNA, 35 bp, Artificial Sequence; identical to SEQ ID NO: 1570
  Synthetic oligonucleotide

SEQ ID NO: 1703 - DNA, 37 bp, Artificial Sequence
  Synthetic oligonucleotide
gcaatatgggatatgtgtaactcagtgagacaggaga

SEQ ID NO: 1704 - DNA, 37 bp, Artificial Sequence
  Synthetic oligonucleotide
gattacataactcgtacgtcgcttgttttaagtttga

SEQ ID NO: 1705 - DNA, 37 bp, Artificial Sequence
  Synthetic oligonucleotide
gcgtgctgctttgtactacggtctcatcgttgtagga

SEQ ID NO: 1706 - DNA, 35 bp, Artificial Sequence
  Synthetic oligonucleotide
gccctggcaccaaagtcgcacaatcaatcgtgtgc

SEQ ID NO: 1707 - DNA, 36 bp, Artificial Sequence
  Synthetic oligonucleotide
gccgttggtattctgtcgtcttcctttgttctatca

SEQ ID NO: 1708 - DNA, 37 bp, Artificial Sequence
  Synthetic oligonucleotide
ggcactgtgctgcgatcaggaaaagtcacataccgga

SEQ ID NO: 1709 - DNA, 38 bp, Artificial Sequence
  Synthetic oligonucleotide
ggcccttgaattaacatgatgaatatcacaacgggtga

SEQ ID NO: 1710 - DNA, 36 bp, Artificial Sequence
  Synthetic oligonucleotide
gggtgtttcctgcttatgactacttttctttacgca

SEQ ID NO: 1711 - DNA, 35 bp, Artificial Sequence
  Synthetic oligonucleotide
ggctcgtattttcccagtatcgtttccggtacgtc

SEQ ID NO: 1712 - DNA, 35 bp, Artificial Sequence
  Synthetic oligonucleotide
ggggatctcgggcgatgaagcctagctattgtact

SEQ ID NO: 1713 - DNA, 35 bp, Artificial Sequence
  Synthetic oligonucleotide
ggtcccgtattccagatatactaacggttaccacc

SEQ ID NO: 1714 - DNA, 37 bp, Artificial Sequence
  Synthetic oligonucleotide
gtactgtccgtgtgaacgggtctctgcagaaattcga

SEQ ID NO: 1715 - DNA, 38 bp, Artificial Sequence
  Synthetic oligonucleotide
gtgatcggtactgttgaacttgttgcaccgcccgctga

SEQ ID NO: 1716 - DNA, 38 bp, Artificial Sequence
  Synthetic oligonucleotide
gtgtcacatggggtgaccggattgaggagaggatatga

SEQ ID NO: 1717 - DNA, 37 bp, Artificial Sequence
  Synthetic oligonucleotide
gtgtcctttctgggttgatgcatttacggtttggtga

SEQ ID NO: 1718 - DNA, 37 bp, Artificial Sequence
  Synthetic oligonucleotide
gttcggttggttcccgcgctgaacaatattacctgga

SEQ ID NO: 1719 - DNA, 36 bp, Artificial Sequence
  Synthetic oligonucleotide
gttgggacccgattaacccaacagaattcggaataa

SEQ ID NO: 1720 - DNA, 36 bp, Artificial Sequence
  Synthetic oligonucleotide
tacctgagcgctggagctcgttagtcggaataggaa

SEQ ID NO: 1721 - DNA, 35 bp, Artificial Sequence
  Synthetic oligonucleotide
tacccgttcaccggataggatgttcgtccttaatt

SEQ ID NO: 1722 - DNA, 38 bp, Artificial Sequence
  Synthetic oligonucleotide
taccgatcaacccagcaaggcttgggtggattgaatga

SEQ ID NO: 1723 - DNA, 36 bp, Artificial Sequence
  Synthetic oligonucleotide
tccccccgtcgcttacggtgttggacgggctcatta

SEQ ID NO: 1724 - DNA, 36 bp, Artificial Sequence
  Synthetic oligonucleotide
tcttcataaatgactaacgcttcttagtgatgttga

SEQ ID NO: 1725 - DNA, 36 bp, Artificial Sequence
  Synthetic oligonucleotide
tgccatacctacccagagtgagacttctagcctgga

SEQ ID NO: 1726 - DNA, 38 bp, Artificial Sequence
  Synthetic oligonucleotide
tgaggtcccttttgtcggggtatatccatgaggtttga

SEQ ID NO: 1727 - DNA, 37 bp, Artificial Sequence
  Synthetic oligonucleotide
tggcttggcccgttcgttcgtgatcaagattttttga

SEQ ID NO: 1728 - DNA, 38 bp, Artificial Sequence
  Synthetic oligonucleotide
tggtctgaaattcccgtgaggagatagatcatttctga

SEQ ID NO: 1729 - DNA, 35 bp, Artificial Sequence
  Synthetic oligonucleotide
tgtccaaatcactcattctcgtaaggttaccgtcc

SEQ ID NO: 1730 - DNA, 36 bp, Artificial Sequence
  Synthetic oligonucleotide
tgttctgtcttatgccatgaagttcttataagtaga

SEQ ID NO: 1731 - DNA, 38 bp, Artificial Sequence
  Synthetic oligonucleotide
ttacccctgtaatgccctacatgatgttcggttcatga

SEQ ID NO: 1732 - DNA, 35 bp, Artificial Sequence
  Synthetic oligonucleotide
ttgtaccagtgcgtatgttgtctcatcaatgtttt

SEQ ID NO: 1733 - DNA, 37 bp, Artificial Sequence
  Synthetic oligonucleotide
ttttagcaacgggagttgcagcggggttgttaaacga

SEQ ID NO: 1734 - DNA, 35 bp, Artificial Sequence; identical to SEQ ID NO: 1591
  Synthetic oligonucleotide

SEQ ID NO: 1735 - DNA, 36 bp, Artificial Sequence; identical to SEQ ID NO: 1586
  Synthetic oligonucleotide

SEQ ID NO: 1736 - DNA, 36 bp, Artificial Sequence; identical to SEQ ID NO: 1589
  Synthetic oligonucleotide

SEQ ID NO: 1737 - DNA, 38 bp, Artificial Sequence; identical to SEQ ID NO: 1612
  Synthetic oligonucleotide

SEQ ID NO: 1738 - DNA, 35 bp, Artificial Sequence; identical to SEQ ID NO: 1594
  Synthetic oligonucleotide

SEQ ID NO: 1739 - DNA, 37 bp, Artificial Sequence; identical to SEQ ID NO: 1595
  Synthetic oligonucleotide

SEQ ID NO: 1740 - DNA, 35 bp, Artificial Sequence
  Synthetic oligonucleotide
attccgtgaggtacgtaaggcaaccagttttattt

SEQ ID NO: 1741 - DNA, 36 bp, Artificial Sequence; identical to SEQ ID NO: 1593
  Synthetic oligonucleotide

SEQ ID NO: 1742 - DNA, 37 bp, Artificial Sequence; identical to SEQ ID NO: 1587
  Synthetic oligonucleotide

SEQ ID NO: 1743 - DNA, 38 bp, Artificial Sequence; identical to SEQ ID NO: 1596
  Synthetic oligonucleotide

SEQ ID NO: 1744 - DNA, 35 bp, Artificial Sequence; identical to SEQ ID NO: 1600
  Synthetic oligonucleotide

SEQ ID NO: 1745 - DNA, 35 bp, Artificial Sequence; identical to SEQ ID NO: 1606
  Synthetic oligonucleotide

SEQ ID NO: 1746 - DNA, 38 bp, Artificial Sequence; identical to SEQ ID NO: 1608
  Synthetic oligonucleotide

SEQ ID NO: 1747 - DNA, 38 bp, Artificial Sequence; identical to SEQ ID NO: 1601
  Synthetic oligonucleotide

SEQ ID NO: 1748 - DNA, 35 bp, Artificial Sequence; identical to SEQ ID NO: 1605
  Synthetic oligonucleotide

SEQ ID NO: 1749 - DNA, 36 bp, Artificial Sequence; identical to SEQ ID NO: 1611
  Synthetic oligonucleotide

SEQ ID NO: 1750 - DNA, 36 bp, Artificial Sequence
  Synthetic oligonucleotide
tcttgtcgggattttgctcctttcatactcatggta

SEQ ID NO: 1751 - DNA, 36 bp, Artificial Sequence; identical to SEQ ID NO: 1598
  Synthetic oligonucleotide

SEQ ID NO: 1752 - DNA, 35 bp, Artificial Sequence; identical to SEQ ID NO: 1599
  Synthetic oligonucleotide

SEQ ID NO: 1753 - DNA, 36 bp, Artificial Sequence; identical to SEQ ID NO: 1603
  Synthetic oligonucleotide

SEQ ID NO: 1754 - DNA, 38 bp, Artificial Sequence; identical to SEQ ID NO: 1609
  Synthetic oligonucleotide

SEQ ID NO: 1755 - DNA, 36 bp, Artificial Sequence; identical to SEQ ID NO: 1593
  Synthetic oligonucleotide

SEQ ID NO: 1756 - DNA, 35 bp, Artificial Sequence; identical to SEQ ID NO: 1591
  Synthetic oligonucleotide

SEQ ID NO: 1757 - DNA, 36 bp, Artificial Sequence; identical to SEQ ID NO: 1590
  Synthetic oligonucleotide

SEQ ID NO: 1758 - DNA, 36 bp, Artificial Sequence; identical to SEQ ID NO: 1617
  Synthetic oligonucleotide

SEQ ID NO: 1759 - DNA, 36 bp, Artificial Sequence; identical to SEQ ID NO: 1616
  Synthetic oligonucleotide

SEQ ID NO: 1760 - DNA, 36 bp, Artificial Sequence; identical to SEQ ID NO: 1586
  Synthetic oligonucleotide

SEQ ID NO: 1761 - DNA, 35 bp, Artificial Sequence; identical to SEQ ID NO: 1620
  Synthetic oligonucleotide

SEQ ID NO: 1762 - DNA, 35 bp, Artificial Sequence; identical to SEQ ID NO: 1594
  Synthetic oligonucleotide

SEQ ID NO: 1763 - DNA, 37 bp, Artificial Sequence; identical to SEQ ID NO: 1587
  Synthetic oligonucleotide

SEQ ID NO: 1764 - DNA, 38 bp, Artificial Sequence; identical to SEQ ID NO: 1596
  Synthetic oligonucleotide

SEQ ID NO: 1765 - DNA, 36 bp, Artificial Sequence; identical to SEQ ID NO: 1589
  Synthetic oligonucleotide

SEQ ID NO: 1766 - DNA, 37 bp, Artificial Sequence; identical to SEQ ID NO: 1595
  Synthetic oligonucleotide

SEQ ID NO: 1767 - DNA, 37 bp, Artificial Sequence
  Synthetic oligonucleotide
gagcgactcatcccggggtttggatcagcgctccgga

SEQ ID NO: 1768 - DNA, 37 bp, Artificial Sequence; identical to SEQ ID NO: 1628
  Synthetic oligonucleotide

SEQ ID NO: 1769 - DNA, 36 bp, Artificial Sequence
  Synthetic oligonucleotide
ggtctcttggtttagatcccgtcttttctgtggaaa

SEQ ID NO: 1770 - DNA, 38 bp, Artificial Sequence; identical to SEQ ID NO: 1601
  Synthetic oligonucleotide

SEQ ID NO: 1771 - DNA, 35 bp, Artificial Sequence; identical to SEQ ID NO: 1606
  Synthetic oligonucleotide

SEQ ID NO: 1772 - DNA, 38 bp, Artificial Sequence
  Synthetic oligonucleotide
gtccaggctctatgcttagtacccgttcatttgcttga

SEQ ID NO: 1773 - DNA, 36 bp, Artificial Sequence; identical to SEQ ID NO: 1603
  Synthetic oligonucleotide

SEQ ID NO: 1774 - DNA, 38 bp, Artificial Sequence; identical to SEQ ID NO: 1636
  Synthetic oligonucleotide

SEQ ID NO: 1775 - DNA, 35 bp, Artificial Sequence; identical to SEQ ID NO: 1637
  Synthetic oligonucleotide

SEQ ID NO: 1776 - DNA, 36 bp, Artificial Sequence; identical to SEQ ID NO: 1638
  Synthetic oligonucleotide

SEQ ID NO: 1777 - DNA, 35 bp, Artificial Sequence
  Synthetic oligonucleotide
tcctagaaatctgtattgtttctcaaggccacctg

SEQ ID NO: 1778 - DNA, 37 bp, Artificial Sequence; identical to SEQ ID NO: 1639
  Synthetic oligonucleotide

SEQ ID NO: 1779 - DNA, 36 bp, Artificial Sequence; identical to SEQ ID NO: 1750
  Synthetic oligonucleotide

SEQ ID NO: 1780 - DNA, 38 bp, Artificial Sequence; identical to SEQ ID NO: 1609
  Synthetic oligonucleotide

SEQ ID NO: 1781 - DNA, 35 bp, Artificial Sequence
  Synthetic oligonucleotide
tgttttatctggatcacactagctattgtacggtt

SEQ ID NO: 1782 - DNA, 37 bp, Artificial Sequence; identical to SEQ ID NO: 1643
  Synthetic oligonucleotide

SEQ ID NO: 1783 - DNA, 37 bp, Artificial Sequence; identical to SEQ ID NO: 1645
  Synthetic oligonucleotide

SEQ ID NO: 1784 - DNA, 37 bp, Artificial Sequence; identical to SEQ ID NO: 1646
  Synthetic oligonucleotide

SEQ ID NO: 1785 - DNA, 35 bp, Artificial Sequence; identical to SEQ ID NO: 1647
  Synthetic oligonucleotide

SEQ ID NO: 1786 - DNA, 35 bp, Artificial Sequence; identical to SEQ ID NO: 1605
  Synthetic oligonucleotide

SEQ ID NO: 1787 - DNA, 37 bp, Artificial Sequence
  Synthetic oligonucleotide
tttgagcgcctcagtttgcgcgacttccagcccgtga

SEQ ID NO: 1788 - DNA, 37 bp, Artificial Sequence; identical to SEQ ID NO: 1649
  Synthetic oligonucleotide

SEQ ID NO: 1789 - DNA, 37 bp, Artificial Sequence; identical to SEQ ID NO: 1650
  Synthetic oligonucleotide

SEQ ID NO: 1790 - DNA, 36 bp, Artificial Sequence; identical to SEQ ID NO: 1652
  Synthetic oligonucleotide

SEQ ID NO: 1791 - DNA, 38 bp, Artificial Sequence; identical to SEQ ID NO: 1653
  Synthetic oligonucleotide

SEQ ID NO: 1792 - DNA, 38 bp, Artificial Sequence
  Synthetic oligonucleotide
atgctatcccgtgaaacgagaacatacggtttttttga

SEQ ID NO: 1793 - DNA, 35 bp, Artificial Sequence; identical to SEQ ID NO: 1654
  Synthetic oligonucleotide

SEQ ID NO: 1794 - DNA, 36 bp, Artificial Sequence; identical to SEQ ID NO: 1540
  Synthetic oligonucleotide

SEQ ID NO: 1795 - DNA, 36 bp, Artificial Sequence
  Synthetic oligonucleotide
agggcaatctgtcccgccctcagcttttttatttaa

SEQ ID NO: 1796 - DNA, 37 bp, Artificial Sequence; identical to SEQ ID NO: 1555
  Synthetic oligonucleotide

SEQ ID NO: 1797 - DNA, 38 bp, Artificial Sequence; identical to SEQ ID NO: 1543
  Synthetic oligonucleotide

SEQ ID NO: 1798 - DNA, 38 bp, Artificial Sequence
  Synthetic oligonucleotide
accgaaaacccgttcccgccgtactgcttctatattga

SEQ ID NO: 1799 - DNA, 36 bp, Artificial Sequence; identical to SEQ ID NO: 1549
  Synthetic oligonucleotide

SEQ ID NO: 1800 - DNA, 36 bp, Artificial Sequence; identical to SEQ ID NO: 1547
  Synthetic oligonucleotide

SEQ ID NO: 1801 - DNA, 35 bp, Artificial Sequence; identical to SEQ ID NO: 1550
  Synthetic oligonucleotide

SEQ ID NO: 1802 - DNA, 35 bp, Artificial Sequence; identical to SEQ ID NO: 1551
  Synthetic oligonucleotide

SEQ ID NO: 1803 - DNA, 35 bp, Artificial Sequence; identical to SEQ ID NO: 1546
  Synthetic oligonucleotide

SEQ ID NO: 1804 - DNA, 38 bp, Artificial Sequence
  Synthetic oligonucleotide
tttccgattattatgaccgcttttattattggaggtga

SEQ ID NO: 1805 - DNA, 38 bp, Artificial Sequence
  Synthetic oligonucleotide
tcttggacgtgcgtgatccccattttatatatgattga

SEQ ID NO: 1806 - DNA, 38 bp, Artificial Sequence; identical to SEQ ID NO: 1543
  Synthetic oligonucleotide

SEQ ID NO: 1807 - DNA, 36 bp, Artificial Sequence; identical to SEQ ID NO: 1553
  Synthetic oligonucleotide

SEQ ID NO: 1808 - DNA, 36 bp, Artificial Sequence; identical to SEQ ID NO: 1540
  Synthetic oligonucleotide

SEQ ID NO: 1809 - DNA, 37 bp, Artificial Sequence; identical to SEQ ID NO: 1542
  Synthetic oligonucleotide

SEQ ID NO: 1810 - DNA, 36 bp, Artificial Sequence; identical to SEQ ID NO: 1549
  Synthetic oligonucleotide

SEQ ID NO: 1811 - DNA, 35 bp, Artificial Sequence; identical to SEQ ID NO: 1551
  Synthetic oligonucleotide

SEQ ID NO: 1812 - DNA, 38 bp, Artificial Sequence; identical to SEQ ID NO: 1805
  Synthetic oligonucleotide

SEQ ID NO: 1813 - DNA, 35 bp, Artificial Sequence; identical to SEQ ID NO: 1546
  Synthetic oligonucleotide

SEQ ID NO: 1814 - DNA, 38 bp, Artificial Sequence
  Synthetic oligonucleotide
tgcccttagtttccgtatgaccactttgattcttttga

SEQ ID NO: 1815 - DNA, 38 bp, Artificial Sequence; identical to SEQ ID NO: 1804
  Synthetic oligonucleotide

SEQ ID NO: 1816 - DNA, 38 bp, Artificial Sequence
  Synthetic oligonucleotide
attcgcatagcctatgggaagggaattgtgaggggtga

SEQ ID NO: 1817 - DNA, 38 bp, Artificial Sequence
  Synthetic oligonucleotide
gaggttccctgtgggtcatgtcgcacgatttttagtga

SEQ ID NO: 1818 - DNA, 38 bp, Artificial Sequence; identical to SEQ ID NO: 1543
  Synthetic oligonucleotide

SEQ ID NO: 1819 - DNA, 38 bp, Artificial Sequence; identical to SEQ ID NO: 1548
  Synthetic oligonucleotide

SEQ ID NO: 1820 - DNA, 37 bp, Artificial Sequence
  Synthetic oligonucleotide
tgcccgcttttggtttatatggcttcttatctttcga

SEQ ID NO: 1821 - DNA, 38 bp, Artificial Sequence; identical to SEQ ID NO: 1804
  Synthetic oligonucleotide

SEQ ID NO: 1822 - DNA, 35 bp, Artificial Sequence; identical to SEQ ID NO: 1550
  Synthetic oligonucleotide

SEQ ID NO: 1823 - DNA, 38 bp, Artificial Sequence
  Synthetic oligonucleotide
aaacgtgggggcgtcccagccccatgtgttatctctga

SEQ ID NO: 1824 - DNA, 38 bp, Artificial Sequence
  Synthetic oligonucleotide
aaccctctcccatcctctcgaaacactagattacctga

SEQ ID NO: 1825 - DNA, 35 bp, Artificial Sequence
  Synthetic oligonucleotide
aacatacgtcccaagcgcatctcgattctatcttc

SEQ ID NO: 1826 - DNA, 37 bp, Artificial Sequence
  Synthetic oligonucleotide
aaccacgcctaaatggattcacttcctcaaaaattga

SEQ ID NO: 1827 - DNA, 37 bp, Artificial Sequence
  Synthetic oligonucleotide
aacgccgcacttcgttaaaagtctataaaactctaga

SEQ ID NO: 1828 - DNA, 37 bp, Artificial Sequence
  Synthetic oligonucleotide
aacgaagtattataacccttgtgtatcccgaccatga

SEQ ID NO: 1829 - DNA, 35 bp, Artificial Sequence
  Synthetic oligonucleotide
aacaaagttcacccataccacaaccccaattcgac

SEQ ID NO: 1830 - DNA, 38 bp, Artificial Sequence
  Synthetic oligonucleotide
aacggctgggaggggtagcattttaactatatttctga

SEQ ID NO: 1831 - DNA, 38 bp, Artificial Sequence
  Synthetic oligonucleotide
aagtggtccgtttcggcaataagtacaacgggatctga

SEQ ID NO: 1832 - DNA, 38 bp, Artificial Sequence
  Synthetic oligonucleotide
aactctgcataactaaccgacgccaactattatcctga

SEQ ID NO: 1833 - DNA, 36 bp, Artificial Sequence
  Synthetic oligonucleotide
aatcaggcttgtttgctagacaaaataagcacgaaa

SEQ ID NO: 1834 - DNA, 38 bp, Artificial Sequence
  Synthetic oligonucleotide
aattgcgttttccggttgactaaaaacacggaatctga

SEQ ID NO: 1835 - DNA, 36 bp, Artificial Sequence
  Synthetic oligonucleotide
aataaacacttcgaccaaactaaggccttatctcca

SEQ ID NO: 1836 - DNA, 38 bp, Artificial Sequence
  Synthetic oligonucleotide
aagtttcctggtcgcccgcttctgaaaagttagtttga

SEQ ID NO: 1837 - DNA, 38 bp, Artificial Sequence
  Synthetic oligonucleotide
aagagggctatgatttagccggtgcctccttgctttga

SEQ ID NO: 1838 - DNA, 37 bp, Artificial Sequence
  Synthetic oligonucleotide
aagccggtatcgcccgtaacattcccttcctctagga

SEQ ID NO: 1839 - DNA, 38 bp, Artificial Sequence
  Synthetic oligonucleotide
aacttcaccgatacggttcttttctctaacccgcttga

SEQ ID NO: 1840 - DNA, 37 bp, Artificial Sequence
  Synthetic oligonucleotide
aaggatagccataggctgatggggactcaacaggtga

SEQ ID NO: 1841 - DNA, 36 bp, Artificial Sequence
  Synthetic oligonucleotide
aatcgtcttacgtgcccttgataaatcccatactaa

SEQ ID NO: 1842 - DNA, 38 bp, Artificial Sequence
  Synthetic oligonucleotide
aattcgcgcgaattgaagaggcccatggcccgctctga

SEQ ID NO: 1843 - DNA, 37 bp, Artificial Sequence
  Synthetic oligonucleotide
accatgaatcaccgcgcctgctactgcaacttttgga

SEQ ID NO: 1844 - DNA, 36 bp, Artificial Sequence
  Synthetic oligonucleotide
acactggcatttttcgaaacatagaatgaatgggaa

SEQ ID NO: 1845 - DNA, 37 bp, Artificial Sequence
  Synthetic oligonucleotide
acacccacaagctttaacttatcataactcgccccga

SEQ ID NO: 1846 - DNA, 35 bp, Artificial Sequence
  Synthetic oligonucleotide
acccaacgttgagcgcaataccccttcataatacc

SEQ ID NO: 1847 - DNA, 35 bp, Artificial Sequence
  Synthetic oligonucleotide
acctctctctgaaatttaactctattctcccattc

SEQ ID NO: 1848 - DNA, 35 bp, Artificial Sequence
  Synthetic oligonucleotide
accggactagatatttaccacattgcatttccata

SEQ ID NO: 1849 - DNA, 35 bp, Artificial Sequence
  Synthetic oligonucleotide
acgctgaatctggttcacaacggggaacgtgttag

SEQ ID NO: 1850 - DNA, 38 bp, Artificial Sequence
  Synthetic oligonucleotide
acccgctgtgtgaaccaccgtgccttcggacgtcatga

SEQ ID NO: 1851 - DNA, 35 bp, Artificial Sequence
  Synthetic oligonucleotide
accgctctctgaaatttatctctattctcccattc

SEQ ID NO: 1852 - DNA, 36 bp, Artificial Sequence
  Synthetic oligonucleotide
acggtacactcactttcctaaatccctctttatcta

SEQ ID NO: 1853 - DNA, 38 bp, Artificial Sequence
  Synthetic oligonucleotide
acgccccagcctatttaccttggagtttctttgactga

SEQ ID NO: 1854 - DNA, 35 bp, Artificial Sequence
  Synthetic oligonucleotide
acccggcgaagacgttagctctggcgctccgttca

SEQ ID NO: 1855 - DNA, 38 bp, Artificial Sequence
  Synthetic oligonucleotide
actatcccaggtttacattagtgtgccccgcattctga

SEQ ID NO: 1856 - DNA, 38 bp, Artificial Sequence
  Synthetic oligonucleotide
actgctttttttgcccaatatctcgagtaaccccctga

SEQ ID NO: 1857 - DNA, 35 bp, Artificial Sequence
  Synthetic oligonucleotide
actgaacactctacatgaccataaacacctctctt

SEQ ID NO: 1858 - DNA, 37 bp, Artificial Sequence
  Synthetic oligonucleotide
actcgggcttccatcaagcttctgattggtgaggtga

SEQ ID NO: 1859 - DNA, 35 bp, Artificial Sequence
  Synthetic oligonucleotide
actgaacactctacatgactgtaaacacctctctt

SEQ ID NO: 1860 - DNA, 38 bp, Artificial Sequence
  Synthetic oligonucleotide
acgtttttctcgctcgtaattttatcgttaatttctga

SEQ ID NO: 1861 - DNA, 37 bp, Artificial Sequence
  Synthetic oligonucleotide
actactcatccccccgtcttaacaacgatcccactga

SEQ ID NO: 1862 - DNA, 37 bp, Artificial Sequence
  Synthetic oligonucleotide
actacgcgctcatcggccagagttccggtcaaccgga

SEQ ID NO: 1863 - DNA, 36 bp, Artificial Sequence
  Synthetic oligonucleotide
acttcacccacacaatacccttatcgataactcaaa

SEQ ID NO: 1864 - DNA, 36 bp, Artificial Sequence
  Synthetic oligonucleotide
acgttacgccgggggactataagcagttcagtagca

SEQ ID NO: 1865 - DNA, 36 bp, Artificial Sequence
  Synthetic oligonucleotide
agacctattccccaatcctgaattacaacatctcta

SEQ ID NO: 1866 - DNA, 35 bp, Artificial Sequence
  Synthetic oligonucleotide
agcacccgcccgcttctattcctcgatcctacact

SEQ ID NO: 1867 - DNA, 35 bp, Artificial Sequence
  Synthetic oligonucleotide
agccccagagtttatccggcttggccggcaattcc

SEQ ID NO: 1868 - DNA, 35 bp, Artificial Sequence
  Synthetic oligonucleotide
aggaatcgatcctggtggttttagctttgaccctt

SEQ ID NO: 1869 - DNA, 37 bp, Artificial Sequence
  Synthetic oligonucleotide
agacttagactcaataactggaccctttacacaccgt

SEQ ID NO: 1870 - DNA, 37 bp, Artificial Sequence; identical to SEQ ID NO: 1555
  Synthetic oligonucleotide

SEQ ID NO: 1871 - DNA, 38 bp, Artificial Sequence
  Synthetic oligonucleotide
atacacgctgcccatttccactcgtcaaaccactatga

SEQ ID NO: 1872 - DNA, 35 bp, Artificial Sequence
  Synthetic oligonucleotide
agttcgcgcaaccccttctcgcttgtgtggcttaa

SEQ ID NO: 1873 - DNA, 35 bp, Artificial Sequence
  Synthetic oligonucleotide
atcaagccggtgtaggcgctccaggcctttcagcc

SEQ ID NO: 1874 - DNA, 35 bp, Artificial Sequence
  Synthetic oligonucleotide
agtcatccattacctcaatgttcatctattttcac

SEQ ID NO: 1875 - DNA, 38 bp, Artificial Sequence
  Synthetic oligonucleotide
atcctctacgttccaaccacttacttttatgccattga

SEQ ID NO: 1876 - DNA, 38 bp, Artificial Sequence
  Synthetic oligonucleotide
atcacactctaactgtaatcaatcatttcgaaccctga

SEQ ID NO: 1877 - DNA, 38 bp, Artificial Sequence
  Synthetic oligonucleotide
atcccttccaattccctataattactactctaatgtga

SEQ ID NO: 1878 - DNA, 37 bp, Artificial Sequence
  Synthetic oligonucleotide
atcccacttgccatcttcggtcctatcaaatggtaga

SEQ ID NO: 1879 - DNA, 34 bp, Artificial Sequence
  Synthetic oligonucleotide
atcttaatgccttgatccgactcctacctcttga

SEQ ID NO: 1880 - DNA, 38 bp, Artificial Sequence
  Synthetic oligonucleotide
atgccccccgcgcttttaactcacacctgctctgctga

SEQ ID NO: 1881 - DNA, 35 bp, Artificial Sequence
  Synthetic oligonucleotide
atgcagtcgttaacgtccatcgcgtgtgtcttccg

SEQ ID NO: 1882 - DNA, 38 bp, Artificial Sequence
  Synthetic oligonucleotide
atcccttttattgttaaacttcatagaaatcatactga

SEQ ID NO: 1883 - DNA, 37 bp, Artificial Sequence
  Synthetic oligonucleotide
atcttcccgccacttgtgccttatcattaccccccga

SEQ ID NO: 1884 - DNA, 36 bp, Artificial Sequence
  Synthetic oligonucleotide
atcccaattcacatacactctcaccctcactaaaca

SEQ ID NO: 1885 - DNA, 36 bp, Artificial Sequence
  Synthetic oligonucleotide
atctacaccctatcgaaacttcccatgaaactacaa

SEQ ID NO: 1886 - DNA, 35 bp, Artificial Sequence
  Synthetic oligonucleotide
attggtgcccgttgtgaggatcaagcaacatgcta

SEQ ID NO: 1887 - DNA, 38 bp, Artificial Sequence
  Synthetic oligonucleotide
caaacgtaccttactgcatacaccttccctgttattga

SEQ ID NO: 1888 - DNA, 35 bp, Artificial Sequence
  Synthetic oligonucleotide
attgaacgagcgagaaatctaagcgccggcatctg

SEQ ID NO: 1889 - DNA, 35 bp, Artificial Sequence
  Synthetic oligonucleotide
atttcctaacattgctctcttaactgttcctatcc

SEQ ID NO: 1890 - DNA, 37 bp, Artificial Sequence
  Synthetic oligonucleotide
cacctggccattacactttccttttgagttctctcga

SEQ ID NO: 1891 - DNA, 38 bp, Artificial Sequence
  Synthetic oligonucleotide
attttagcatacggctccttggtttcatcagctgttga

SEQ ID NO: 1892 - DNA, 35 bp, Artificial Sequence
  Synthetic oligonucleotide
attcgaattctccacctgataaccgccacattaaa

SEQ ID NO: 1893 - DNA, 36 bp, Artificial Sequence
  Synthetic oligonucleotide
atgtttgtcggcctttgtgggtcctttcgcttccca

SEQ ID NO: 1894 - DNA, 38 bp, Artificial Sequence
  Synthetic oligonucleotide
ccgcaacccaactcgtattctaatctactacacattga

SEQ ID NO: 1895 - DNA, 36 bp, Artificial Sequence; identical to SEQ ID NO: 1541
  Synthetic oligonucleotide

SEQ ID NO: 1896 - DNA, 35 bp, Artificial Sequence
  Synthetic oligonucleotide
ccccaaggacgcacgggggtacccgcatactgtta

SEQ ID NO: 1897 - DNA, 36 bp, Artificial Sequence
  Synthetic oligonucleotide
ccagccggtccaggtggctgacccgcgaaggagcta

SEQ ID NO: 1898 - DNA, 37 bp, Artificial Sequence
  Synthetic oligonucleotide
cccgtcatgaaccgggacccaatcttaccttttatga

SEQ ID NO: 1899 - DNA, 37 bp, Artificial Sequence
  Synthetic oligonucleotide
ccgcgcgttagctacggatggcattaacccagttgga

SEQ ID NO: 1900 - DNA, 38 bp, Artificial Sequence
  Synthetic oligonucleotide
catggctctcatccgaagacgcgccttcttctatttga

SEQ ID NO: 1901 - DNA, 38 bp, Artificial Sequence
  Synthetic oligonucleotide
ccgctggcgctattttttttctatgctgttggagctga

SEQ ID NO: 1902 - DNA, 36 bp, Artificial Sequence
  Synthetic oligonucleotide
catggatttagtcgtccctagccgaacttctgttaa

SEQ ID NO: 1903 - DNA, 38 bp, Artificial Sequence
  Synthetic oligonucleotide
ccgcttaacggggcacccaactaattcgatatctctga

SEQ ID NO: 1904 - DNA, 36 bp, Artificial Sequence
  Synthetic oligonucleotide
cggtccgtcgacccatgttttttggctctattgcta

SEQ ID NO: 1905 - DNA, 36 bp, Artificial Sequence; identical to SEQ ID NO: 1540
  Synthetic oligonucleotide

SEQ ID NO: 1906 - DNA, 38 bp, Artificial Sequence
  Synthetic oligonucleotide
cgctattattactctccccgggtaatatcctatattga

SEQ ID NO: 1907 - DNA, 36 bp, Artificial Sequence
  Synthetic oligonucleotide
ccttgaaaggtgtaacgcacgttggatcgtcgtgaa

SEQ ID NO: 1908 - DNA, 36 bp, Artificial Sequence
  Synthetic oligonucleotide
cgacgaaaccggacaccatacccttacgacttttaa

SEQ ID NO: 1909 - DNA, 35 bp, Artificial Sequence
  Synthetic oligonucleotide
ccttaccccgagcgtgcccccttcttaagtattcg

SEQ ID NO: 1910 - DNA, 36 bp, Artificial Sequence
  Synthetic oligonucleotide
cgttttatagtttcgatctaaggttcattatatata

SEQ ID NO: 1911 - DNA, 38 bp, Artificial Sequence
  Synthetic oligonucleotide
cgcttaattcttggttatattatctaactacgcaatga

SEQ ID NO: 1912 - DNA, 37 bp, Artificial Sequence
  Synthetic oligonucleotide
ctctaccgagtcccttacatatgtacccacttccaga

SEQ ID NO: 1913 - DNA, 37 bp, Artificial Sequence
  Synthetic oligonucleotide
gaacccgagggagggattctcaatgtgcaatgtatga

SEQ ID NO: 1914 - DNA, 38 bp, Artificial Sequence
  Synthetic oligonucleotide
cttcggggcactaccttcgtttttttgttctactatga

SEQ ID NO: 1915 - DNA, 37 bp, Artificial Sequence
  Synthetic oligonucleotide
gaagccccataaaagacgccgaaatattgcatctgga

SEQ ID NO: 1916 - DNA, 37 bp, Artificial Sequence
  Synthetic oligonucleotide
gaaactaaaccgactgggttaaattttatcatgcgga

SEQ ID NO: 1917 - DNA, 37 bp, Artificial Sequence
  Synthetic oligonucleotide
gagcttaaacctctccgagcgcttatggctcgattga

SEQ ID NO: 1918 - DNA, 35 bp, Artificial Sequence
  Synthetic oligonucleotide
gaggaaacgcggcagccttataggccgatctttca

SEQ ID NO: 1919 - DNA, 38 bp, Artificial Sequence
  Synthetic oligonucleotide
gaggtttaataaataggccatgcttattggtccgctga

SEQ ID NO: 1920 - DNA, 37 bp, Artificial Sequence
  Synthetic oligonucleotide
gatcacgtcgcggattcccccgtttcgcgagaggaga

SEQ ID NO: 1921 - DNA, 37 bp, Artificial Sequence
  Synthetic oligonucleotide
gagttcctttatttgcatttttatcagatcaagttta

SEQ ID NO: 1922 - DNA, 36 bp, Artificial Sequence
  Synthetic oligonucleotide
gagtcctctacttcatataatctccagaggggggga

SEQ ID NO: 1923 - DNA, 35 bp, Artificial Sequence
  Synthetic oligonucleotide
gagtttcgatattcgtcttaaatccacccctgtaa

SEQ ID NO: 1924 - DNA, 36 bp, Artificial Sequence
  Synthetic oligonucleotide
gagtacgatttgaccactatcttcgtagattccata

SEQ ID NO: 1925 - DNA, 37 bp, Artificial Sequence
  Synthetic oligonucleotide
gataacgggaaccaaatcgcgctgtagaggcctggga

SEQ ID NO: 1926 - DNA, 36 bp, Artificial Sequence
  Synthetic oligonucleotide
gatctacccgaccctattaaccttagtacttgacaa

SEQ ID NO: 1927 - DNA, 38 bp, Artificial Sequence
  Synthetic oligonucleotide
gatccctaattgttttcctattaatcgttttcccatga

SEQ ID NO: 1928 - DNA, 36 bp, Artificial Sequence
  Synthetic oligonucleotide
gatcgctcgccaggcacactgccgtttcgagtatta

SEQ ID NO: 1929 - DNA, 36 bp, Artificial Sequence
  Synthetic oligonucleotide
gcacgacgaacgagtccgggaggaccggcttcccca

SEQ ID NO: 1930 - DNA, 35 bp, Artificial Sequence
  Synthetic oligonucleotide
gatcttatccggcccacatctttaaccccaacact

SEQ ID NO: 1931 - DNA, 35 bp, Artificial Sequence
  Synthetic oligonucleotide
gccgtctcggggtaatcggcctaatacgtagacat

SEQ ID NO: 1932 - DNA, 37 bp, Artificial Sequence
  Synthetic oligonucleotide
gccgcggggggccggggaggtcccatcgaggttatga

SEQ ID NO: 1933 - DNA, 38 bp, Artificial Sequence
  Synthetic oligonucleotide
gctaacctttgttatactaggactttctccacaggtga

SEQ ID NO: 1934 - DNA, 35 bp, Artificial Sequence
  Synthetic oligonucleotide
ggggtttcttggagcgcaatacggtttgtttctga

SEQ ID NO: 1935 - DNA, 35 bp, Artificial Sequence
  Synthetic oligonucleotide
ggcgaaactagcctggattggagttagacctttca

SEQ ID NO: 1936 - DNA, 38 bp, Artificial Sequence
  Synthetic oligonucleotide
gggggagttgcatggttgcaactctggaggccctttga

SEQ ID NO: 1937 - DNA, 37 bp, Artificial Sequence
  Synthetic oligonucleotide
gggtttaacgtgcccacccgtcagggtagtcctacga

SEQ ID NO: 1938 - DNA, 35 bp, Artificial Sequence
  Synthetic oligonucleotide
gggtatgccgttctgtccgggccttatgcgcatat

SEQ ID NO: 1939 - DNA, 37 bp, Artificial Sequence
  Synthetic oligonucleotide
gggacaatagaattaaactcgggcttaggtcctcgga

SEQ ID NO: 1940 - DNA, 37 bp, Artificial Sequence
  Synthetic oligonucleotide
ggggagatggctgggtcttgataccggaaacttgcga

SEQ ID NO: 1941 - DNA, 38 bp, Artificial Sequence
  Synthetic oligonucleotide
ggcttgtatacctattatgttaggcaggtgccctttga

SEQ ID NO: 1942 - DNA, 36 bp, Artificial Sequence
  Synthetic oligonucleotide
gtggcccggttgtgttgtcacggacgtgcggtccca

SEQ ID NO: 1943 - DNA, 36 bp, Artificial Sequence
  Synthetic oligonucleotide
gtgttgtatgtcttcgcaatcctagccgaccgccaa

SEQ ID NO: 1944 - DNA, 38 bp, Artificial Sequence
  Synthetic oligonucleotide
gtgcgcgttggtgggccgcttgtaactataccctttga

SEQ ID NO: 1945 - DNA, 35 bp, Artificial Sequence
  Synthetic oligonucleotide
gttttggtggttcaaaccggtcgcccactggcatt

SEQ ID NO: 1946 - DNA, 36 bp, Artificial Sequence
  Synthetic oligonucleotide
tacatcccggctagatccgtgaggactggcggtgtc

SEQ ID NO: 1947 - DNA, 38 bp, Artificial Sequence
  Synthetic oligonucleotide
taaaagaactcttttcgtcaaccatacctcaggcctga

SEQ ID NO: 1948 - DNA, 37 bp, Artificial Sequence
  Synthetic oligonucleotide
tagtccatatatagcttaaactgatgcgggggttcga

SEQ ID NO: 1949 - DNA, 35 bp, Artificial Sequence
  Synthetic oligonucleotide
tacccttatcggcacccccacacttatggtaattc

SEQ ID NO: 1950 - DNA, 36 bp, Artificial Sequence
  Synthetic oligonucleotide
tacgggaatgggtttggccctaaaagccagacacga

SEQ ID NO: 1951 - DNA, 36 bp, Artificial Sequence
  Synthetic oligonucleotide
tagctaacggtcccaacaagcatgttgggattggca

SEQ ID NO: 1952 - DNA, 38 bp, Artificial Sequence
  Synthetic oligonucleotide
tacgccatgatacttacatctagccaccttttttttga

SEQ ID NO: 1953 - DNA, 36 bp, Artificial Sequence
  Synthetic oligonucleotide
tatatctggccaccggcgggggggctggtgatctta

SEQ ID NO: 1954 - DNA, 36 bp, Artificial Sequence; identical to SEQ ID NO: 1720
  Synthetic oligonucleotide

SEQ ID NO: 1955 - DNA, 38 bp, Artificial Sequence
  Synthetic oligonucleotide
tatcaaattcggtcgtagtatttgtcgccgtaacgtta

SEQ ID NO: 1956 - DNA, 38 bp, Artificial Sequence
  Synthetic oligonucleotide
tactagcgatcatttgttcgctttgggttggttattga

SEQ ID NO: 1957 - DNA, 35 bp, Artificial Sequence
  Synthetic oligonucleotide
taggtggtcgtgcctacattgactgtttccatcca

SEQ ID NO: 1958 - DNA, 35 bp, Artificial Sequence
  Synthetic oligonucleotide
tactccggcccaactatatacttctccacacctcc

SEQ ID NO: 1959 - DNA, 37 bp, Artificial Sequence
  Synthetic oligonucleotide
tatcacgacttcccaccttcttccgcctttgtcccaa

SEQ ID NO: 1960 - DNA, 37 bp, Artificial Sequence
  Synthetic oligonucleotide
tcacagggcctgaaggtagtagatattaaacgctgga

SEQ ID NO: 1961 - DNA, 35 bp, Artificial Sequence
  Synthetic oligonucleotide
tcattatacggatcccgcgccgaacctggccgact

SEQ ID NO: 1962 - DNA, 38 bp, Artificial Sequence
  Synthetic oligonucleotide
tcactttggtaaactattcccccgtttctctcctatga

SEQ ID NO: 1963 - DNA, 37 bp, Artificial Sequence
  Synthetic oligonucleotide
tcaatacgcgtccggaaatccccctgtgcaagctgga

SEQ ID NO: 1964 - DNA, 37 bp, Artificial Sequence
  Synthetic oligonucleotide
tcaatgcttgctgctcgtagctttcaaccgtggtgga

SEQ ID NO: 1965 - DNA, 35 bp, Artificial Sequence
  Synthetic oligonucleotide
tatcgtttgccatattccgccagagaaaagtctcc

SEQ ID NO: 1966 - DNA, 38 bp, Artificial Sequence
  Synthetic oligonucleotide
tcctcgtggcttaccggtatactcccccaactcattga

SEQ ID NO: 1967 - DNA, 37 bp, Artificial Sequence
  Synthetic oligonucleotide
tccctccccgttgcccttattccgtactcacttatga

SEQ ID NO: 1968 - DNA, 38 bp, Artificial Sequence
  Synthetic oligonucleotide
tcctgtctccgctaggtaacatccgaatactctcttga

SEQ ID NO: 1969 - DNA, 36 bp, Artificial Sequence
  Synthetic oligonucleotide
tcctcgaccatctacaaactttgaagccacacccca

SEQ ID NO: 1970 - DNA, 35 bp, Artificial Sequence; identical to SEQ ID NO: 1551
  Synthetic oligonucleotide

SEQ ID NO: 1971 - DNA, 38 bp, Artificial Sequence
  Synthetic oligonucleotide
tccactcaatccccggttcgtatgctctgtaccattga

SEQ ID NO: 1972 - DNA, 38 bp, Artificial Sequence
  Synthetic oligonucleotide
tcccgtcccacctttactttgctacttcaccatcttga

SEQ ID NO: 1973 - DNA, 38 bp, Artificial Sequence
  Synthetic oligonucleotide
tccttgcatacctcggctctcctttctctcacatttga

SEQ ID NO: 1974 - DNA, 37 bp, Artificial Sequence
  Synthetic oligonucleotide
tctcgtgcgcgatttctgttctagggtaggagaggga

SEQ ID NO: 1975 - DNA, 38 bp, Artificial Sequence
  Synthetic oligonucleotide
tcggctcatccaaaattacttgcgggtttcataaatga

SEQ ID NO: 1976 - DNA, 36 bp, Artificial Sequence
  Synthetic oligonucleotide
tctcgcacctttattttctccgctcttttgtttcca

SEQ ID NO: 1977 - DNA, 38 bp, Artificial Sequence
  Synthetic oligonucleotide
tcgctacaattggccttttctgtatttgggttctatga

SEQ ID NO: 1978 - DNA, 37 bp, Artificial Sequence
  Synthetic oligonucleotide
tgcacgccgagcaaggcggtactctaggacccacgga

SEQ ID NO: 1979 - DNA, 38 bp, Artificial Sequence
  Synthetic oligonucleotide
tgccgcttttaccacttgacttacgataagaaaactga

SEQ ID NO: 1980 - DNA, 37 bp, Artificial Sequence
  Synthetic oligonucleotide
tgagtttttctaaataccgcagcctcagccacgcgga

SEQ ID NO: 1981 - DNA, 34 bp, Artificial Sequence
  Synthetic oligonucleotide
tgccttttttttcaccggtttgattccgctttcg

SEQ ID NO: 1982 - DNA, 35 bp, Artificial Sequence
  Synthetic oligonucleotide
tgaaagccaggtattttggggctcctttttcctcc

SEQ ID NO: 1983 - DNA, 38 bp, Artificial Sequence
  Synthetic oligonucleotide
tgacctacaaagggtttgaaataaatcgctcgacgtga

SEQ ID NO: 1984 - DNA, 35 bp, Artificial Sequence
  Synthetic oligonucleotide
tggaaagttagatttcctggggtctcgctttgagt

SEQ ID NO: 1985 - DNA, 35 bp, Artificial Sequence
  Synthetic oligonucleotide
tgtacttacttttactcgatcaccttataatttcc

SEQ ID NO: 1986 - DNA, 38 bp, Artificial Sequence
  Synthetic oligonucleotide
tggcctattctcgtacaatttacttcttatcatcctga

SEQ ID NO: 1987 - DNA, 38 bp, Artificial Sequence
  Synthetic oligonucleotide
ttagtacgtgccgagccccgagccctagagacctgtga

SEQ ID NO: 1988 - DNA, 36 bp, Artificial Sequence; identical to SEQ ID NO: 1730
  Synthetic oligonucleotide

SEQ ID NO: 1989 - DNA, 35 bp, Artificial Sequence
  Synthetic oligonucleotide
tgttagttccactttccgataatccgtcttcctta

SEQ ID NO: 1990 - DNA, 36 bp, Artificial Sequence
  Synthetic oligonucleotide
tgttaggcctttatttaccttatcttaattgtttta

SEQ ID NO: 1991 - DNA, 38 bp, Artificial Sequence
  Synthetic oligonucleotide
tgtttttacacgcctactttttatctatctccacatga

SEQ ID NO: 1992 - DNA, 38 bp, Artificial Sequence
  Synthetic oligonucleotide
ttccccttttatttgcccgtaataatcgcttgacatga

SEQ ID NO: 1993 - DNA, 38 bp, Artificial Sequence
  Synthetic oligonucleotide
ttgaacctcggtagagccgtaaggcctatccggtttga

SEQ ID NO: 1994 - DNA, 37 bp, Artificial Sequence
  Synthetic oligonucleotide
ttcgacccttttccatacttcttctcacgcaaattga

SEQ ID NO: 1995 - DNA, 35 bp, Artificial Sequence
  Synthetic oligonucleotide
ttcttaatgtaaacttttgttgatactgtgccacc

SEQ ID NO: 1996 - DNA, 36 bp, Artificial Sequence
  Synthetic oligonucleotide
ttcccctctactcgcctattttcctcataaaattta

SEQ ID NO: 1997 - DNA, 35 bp, Artificial Sequence
  Synthetic oligonucleotide
ttcctcccccccgtgcaattttagaggtcccgtgg

SEQ ID NO: 1998 - DNA, 35 bp, Artificial Sequence
  Synthetic oligonucleotide
ttctcaccgtacatcccttacctatccccttttat

SEQ ID NO: 1999 - DNA, 38 bp, Artificial Sequence; identical to SEQ ID NO: 1804
  Synthetic oligonucleotide

SEQ ID NO: 2000 - DNA, 36 bp, Artificial Sequence
  Synthetic oligonucleotide
tttgcgaatctagctttcctgtatacatgacaataa

SEQ ID NO: 2001 - DNA, 35 bp, Artificial Sequence
  Synthetic oligonucleotide
ttggtctattatgctctatatgtgaagtgcgaaaa

SEQ ID NO: 2002 - DNA, 35 bp, Artificial Sequence
  Synthetic oligonucleotide
ttttagttccactttccgataatccgccttcctta

SEQ ID NO: 2003 - DNA, 35 bp, Artificial Sequence
  Synthetic oligonucleotide
ttttagtatacccaccgcgatactctcagtcttgc

SEQ ID NO: 2004 - DNA, 38 bp, Artificial Sequence
  Synthetic oligonucleotide
ttttggcgtgagctccaggtagtggttgaaacccatga

SEQ ID NO: 2005 - DNA, 37 bp, Artificial Sequence
  Synthetic oligonucleotide
agttcgccgttggaggctctttcgacatcatgctaga

SEQ ID NO: 2006 - DNA, 36 bp, Artificial Sequence; identical to SEQ ID NO: 1586
  Synthetic oligonucleotide

SEQ ID NO: 2007 - DNA, 35 bp, Artificial Sequence
  Synthetic oligonucleotide
aaagcgatcacgtttctttgggctgctgtctagca

SEQ ID NO: 2008 - DNA, 36 bp, Artificial Sequence
  Synthetic oligonucleotide
ccattaacggtaagacttaattccgtttggcgtgta

SEQ ID NO: 2009 - DNA, 37 bp, Artificial Sequence; identical to SEQ ID NO: 1587
  Synthetic oligonucleotide

SEQ ID NO: 2010 - DNA, 36 bp, Artificial Sequence
  Synthetic oligonucleotide
aatcgtactcacggtgacatccttggtttgatggta

SEQ ID NO: 2011 - DNA, 36 bp, Artificial Sequence; identical to SEQ ID NO: 1590
  Synthetic oligonucleotide

SEQ ID NO: 2012 - DNA, 38 bp, Artificial Sequence
  Synthetic oligonucleotide
gagttttactgccgtgtcaattatcggtcctgtgttga

SEQ ID NO: 2013 - DNA, 38 bp, Artificial Sequence
  Synthetic oligonucleotide
cgggacgaatcttagtttattccattcgcaagtgctga

SEQ ID NO: 2014 - DNA, 35 bp, Artificial Sequence
  Synthetic oligonucleotide
gatcataccgcgatatagacattgcaccgtttcta

SEQ ID NO: 2015 - DNA, 35 bp, Artificial Sequence; identical to SEQ ID NO: 1591
  Synthetic oligonucleotide

SEQ ID NO: 2016 - DNA, 38 bp, Artificial Sequence
  Synthetic oligonucleotide
agggacgaatcttagtttattccattcgcaagtgctga

SEQ ID NO: 2017 - DNA, 38 bp, Artificial Sequence
  Synthetic oligonucleotide
atcgcttaagttccgtaagggttaaggttcgttattga

SEQ ID NO: 2018 - DNA, 35 bp, Artificial Sequence
  Synthetic oligonucleotide
gagtacgcgcaatgacaatcgacttgttttcggtc

SEQ ID NO: 2019 - DNA, 37 bp, Artificial Sequence; identical to SEQ ID NO: 1595
  Synthetic oligonucleotide

SEQ ID NO: 2020 - DNA, 36 bp, Artificial Sequence
  Synthetic oligonucleotide
cctcagtttacgtactcatcttgaatgggggaaata

SEQ ID NO: 2021 - DNA, 38 bp, Artificial Sequence; identical to SEQ ID NO: 1596
  Synthetic oligonucleotide

SEQ ID NO: 2022 - DNA, 35 bp, Artificial Sequence; identical to SEQ ID NO: 1597
  Synthetic oligonucleotide

SEQ ID NO: 2023 - DNA, 38 bp, Artificial Sequence
  Synthetic oligonucleotide
agattaggttgctctgtcccgtgcttaagtatcgctga

SEQ ID NO: 2024 - DNA, 38 bp, Artificial Sequence
  Synthetic oligonucleotide
acattttccgcatgggacggaatgttcttcttcattga

SEQ ID NO: 2025 - DNA, 36 bp, Artificial Sequence; identical to SEQ ID NO: 1750
  Synthetic oligonucleotide

SEQ ID NO: 2026 - DNA, 36 bp, Artificial Sequence; identical to SEQ ID NO: 1598
  Synthetic oligonucleotide

SEQ ID NO: 2027 - DNA, 35 bp, Artificial Sequence; identical to SEQ ID NO: 1426
  Synthetic oligonucleotide

SEQ ID NO: 2028 - DNA, 35 bp, Artificial Sequence
  Synthetic oligonucleotide
tacctcatgtttgtcactatggaaatcatcccgcc

SEQ ID NO: 2029 - DNA, 35 bp, Artificial Sequence
  Synthetic oligonucleotide
tgcttctgcatgcaacgtgctctggactagctgtc

SEQ ID NO: 2030 - DNA, 35 bp, Artificial Sequence; identical to SEQ ID NO: 1599
  Synthetic oligonucleotide

SEQ ID NO: 2031 - DNA, 37 bp, Artificial Sequence; identical to SEQ ID NO: 1650
  Synthetic oligonucleotide

SEQ ID NO: 2032 - DNA, 36 bp, Artificial Sequence; identical to SEQ ID NO: 1638
  Synthetic oligonucleotide

SEQ ID NO: 2033 - DNA, 37 bp, Artificial Sequence; identical to SEQ ID NO: 1649
  Synthetic oligonucleotide

SEQ ID NO: 2034 - DNA, 38 bp, Artificial Sequence; identical to SEQ ID NO: 1601
  Synthetic oligonucleotide

SEQ ID NO: 2035 - DNA, 36 bp, Artificial Sequence; identical to SEQ ID NO: 1602
  Synthetic oligonucleotide

SEQ ID NO: 2036 - DNA, 36 bp, Artificial Sequence; identical to SEQ ID NO: 1603
  Synthetic oligonucleotide

SEQ ID NO: 2037 - DNA, 36 bp, Artificial Sequence
  Synthetic oligonucleotide
ttggcctttgagttagtgcctagatagcctgagtta

SEQ ID NO: 2038 - DNA, 36 bp, Artificial Sequence
  Synthetic oligonucleotide
tcattggttccgatccggggctctggacctgacata

SEQ ID NO: 2039 - DNA, 36 bp, Artificial Sequence; identical to SEQ ID NO: 1604
  Synthetic oligonucleotide

SEQ ID NO: 2040 - DNA, 35 bp, Artificial Sequence; identical to SEQ ID NO: 1605
  Synthetic oligonucleotide

SEQ ID NO: 2041 - DNA, 36 bp, Artificial Sequence
  Synthetic oligonucleotide
gcggagcgcttatataatggtgttgtaggtccatta

SEQ ID NO: 2042 - DNA, 35 bp, Artificial Sequence
  Synthetic oligonucleotide
gtacgccgctgccaataatgtctgttgttacattc

SEQ ID NO: 2043 - DNA, 36 bp, Artificial Sequence
  Synthetic oligonucleotide
tttaatggggagctacgtctcgaatcgattttggta

SEQ ID NO: 2044 - DNA, 35 bp, Artificial Sequence; identical to SEQ ID NO: 1606
  Synthetic oligonucleotide

SEQ ID NO: 2045 - DNA, 35 bp, Artificial Sequence
  Synthetic oligonucleotide
ttcccttgttcgagtttcccagcctggacgccctg

SEQ ID NO: 2046 - DNA, 36 bp, Artificial Sequence
  Synthetic oligonucleotide
tccctgtcggtccaaacgtaagggcgggctaaaaca

SEQ ID NO: 2047 - DNA, 36 bp, Artificial Sequence
  Synthetic oligonucleotide
gtctggctggaaaatcagggttgcctatgtttcaaa

SEQ ID NO: 2048 - DNA, 36 bp, Artificial Sequence
  Synthetic oligonucleotide
tacattccgggctgttcagcaatgtcgctccagtta

SEQ ID NO: 2049 - DNA, 38 bp, Artificial Sequence; identical to SEQ ID NO: 1609
  Synthetic oligonucleotide

SEQ ID NO: 2050 - DNA, 35 bp, Artificial Sequence
  Synthetic oligonucleotide
tttgcaagttcgctccgtatatccactgtgaagac

SEQ ID NO: 2051 - DNA, 35 bp, Artificial Sequence
  Synthetic oligonucleotide
tttgcaagttcgctccgtatatccactgtgaagcc

SEQ ID NO: 2052 - DNA, 36 bp, Artificial Sequence
  Synthetic oligonucleotide
tcctctccgtctgtgaagacgtgtgtggcggaatta

SEQ ID NO: 2053 - DNA, 35 bp, Artificial Sequence; identical to SEQ ID NO: 1644
  Synthetic oligonucleotide

SEQ ID NO: 2054 - DNA, 36 bp, Artificial Sequence; identical to SEQ ID NO: 1611
  Synthetic oligonucleotide

SEQ ID NO: 2055 - DNA, 37 bp, Artificial Sequence
  Synthetic oligonucleotide
aaccaaacctgtacccgaataaatcatccattaacga

SEQ ID NO: 2056 - DNA, 36 bp, Artificial Sequence
  Synthetic oligonucleotide
aacccaattcacatactctctcaccctcactaaaca

SEQ ID NO: 2057 - DNA, 37 bp, Artificial Sequence
  Synthetic oligonucleotide
aacaacctcgaatttgtataggttcgcatcactctga

SEQ ID NO: 2058 - DNA, 35 bp, Artificial Sequence
  Synthetic oligonucleotide
aactgtcatccgctgactaactcaatctaactcca

SEQ ID NO: 2059 - DNA, 38 bp, Artificial Sequence
  Synthetic oligonucleotide
acattaaggatttatcttcacccatttttgcctcttga

SEQ ID NO: 2060 - DNA, 38 bp, Artificial Sequence
  Synthetic oligonucleotide
acaaagtaacgtacctcagttccggtacttacgggtga

SEQ ID NO: 2061 - DNA, 35 bp, Artificial Sequence
  Synthetic oligonucleotide
accccacctgcacaccttcatctcatctattacat

SEQ ID NO: 2062 - DNA, 38 bp, Artificial Sequence; identical to SEQ ID NO: 2024
  Synthetic oligonucleotide

SEQ ID NO: 2063 - DNA, 37 bp, Artificial Sequence
  Synthetic oligonucleotide
acaattaatataaattccttacatcaatcctagacga

SEQ ID NO: 2064 - DNA, 38 bp, Artificial Sequence
  Synthetic oligonucleotide
acattcccgtggtggtccttacgggtgggccagcctga

SEQ ID NO: 2065 - DNA, 38 bp, Artificial Sequence; identical to SEQ ID NO: 1612
  Synthetic oligonucleotide

SEQ ID NO: 2066 - DNA, 35 bp, Artificial Sequence
  Synthetic oligonucleotide
accggactgcacagggatcccgataggagggtgac

SEQ ID NO: 2067 - DNA, 37 bp, Artificial Sequence
  Synthetic oligonucleotide
acccttgcaatcaatccccccttttacctgtacatga

SEQ ID NO: 2068 - DNA, 36 bp, Artificial Sequence
  Synthetic oligonucleotide
actcgcccttcacgactttatccaaatttactttca

SEQ ID NO: 2069 - DNA, 35 bp, Artificial Sequence
  Synthetic oligonucleotide
acgtctgccaaatctactcgcattcgatacacaca

SEQ ID NO: 2070 - DNA, 35 bp, Artificial Sequence
  Synthetic oligonucleotide
actactgggcgcactagcgcgaggctccactgaat

SEQ ID NO: 2071 - DNA, 38 bp, Artificial Sequence
  Synthetic oligonucleotide
actcacattcccaccccctattgcctttaaatacctga

SEQ ID NO: 2072 - DNA, 37 bp, Artificial Sequence
  Synthetic oligonucleotide
actgcagcatcaagccactaattggggcttgtatcga

SEQ ID NO: 2073 - DNA, 37 bp, Artificial Sequence
  Synthetic oligonucleotide
acggttggagcttgtgggaaactaggttgggttcgga

SEQ ID NO: 2074 - DNA, 35 bp, Artificial Sequence; identical to SEQ ID NO: 1597
  Synthetic oligonucleotide

SEQ ID NO: 2075 - DNA, 35 bp, Artificial Sequence
  Synthetic oligonucleotide
agcacccacccgcttctattcctcgatcatacact

SEQ ID NO: 2076 - DNA, 35 bp, Artificial Sequence; identical to SEQ ID NO: 1591
  Synthetic oligonucleotide

SEQ ID NO: 2077 - DNA, 36 bp, Artificial Sequence; identical to SEQ ID NO: 1590
  Synthetic oligonucleotide

SEQ ID NO: 2078 - DNA, 35 bp, Artificial Sequence
  Synthetic oligonucleotide
agattgctccgcagtacggtgtagggcgataaaaa

SEQ ID NO: 2079 - DNA, 35 bp, Artificial Sequence
  Synthetic oligonucleotide
agccgcccctttagacagaggttacgacttgcgta

SEQ ID NO: 2080 - DNA, 38 bp, Artificial Sequence
  Synthetic oligonucleotide
actttggggctttctcggtcttcgcactatggtactga

SEQ ID NO: 2081 - DNA, 36 bp, Artificial Sequence; identical to SEQ ID NO: 1617
  Synthetic oligonucleotide

SEQ ID NO: 2082 - DNA, 36 bp, Artificial Sequence
  Synthetic oligonucleotide
agaaccccattctcattccaccagttactacgctta

SEQ ID NO: 2083 - DNA, 36 bp, Artificial Sequence
  Synthetic oligonucleotide
aggtatacaaatgtgtagtctagtcctgccgatcga

SEQ ID NO: 2084 - DNA, 36 bp, Artificial Sequence; identical to SEQ ID NO: 1586
  Synthetic oligonucleotide

SEQ ID NO: 2085 - DNA, 36 bp, Artificial Sequence
  Synthetic oligonucleotide
agggattcgccctgtgtcacgctcaaactgtagtaa

SEQ ID NO: 2086 - DNA, 38 bp, Artificial Sequence
  Synthetic oligonucleotide
agtaatccccggcgtataatttcagtcctgtggtttga

SEQ ID NO: 2087 - DNA, 35 bp, Artificial Sequence
  Synthetic oligonucleotide
agttgatgcagtgggacctgagattaggcttatga

SEQ ID NO: 2088 - DNA, 36 bp, Artificial Sequence
  Synthetic oligonucleotide
agtattcctctggtagtatttttccttaattccgta

SEQ ID NO: 2089 - DNA, 35 bp, Artificial Sequence; identical to SEQ ID NO: 1620
  Synthetic oligonucleotide

SEQ ID NO: 2090 - DNA, 35 bp, Artificial Sequence
  Synthetic oligonucleotide
agtacctcttgtgggtcttggggctgccactgcct

SEQ ID NO: 2091 - DNA, 36 bp, Artificial Sequence
  Synthetic oligonucleotide
atcaccgtccttatcataaccagttcgttttttata

SEQ ID NO: 2092 - DNA, 36 bp, Artificial Sequence
  Synthetic oligonucleotide
atgcttccatctctgttttttaaccccttaccgtta

SEQ ID NO: 2093 - DNA, 35 bp, Artificial Sequence; identical to SEQ ID NO: 1594
  Synthetic oligonucleotide

SEQ ID NO: 2094 - DNA, 37 bp, Artificial Sequence
  Synthetic oligonucleotide
caccctaatcaccgctaaccttaccataacaatttga

SEQ ID NO: 2095 - DNA, 37 bp, Artificial Sequence
  Synthetic oligonucleotide
cagccgctctagttacaggtttactgcggctaaacga

SEQ ID NO: 2096 - DNA, 35 bp, Artificial Sequence
  Synthetic oligonucleotide
cacagtatccttgtacagattttgatggttgttgg

SEQ ID NO: 2097 - DNA, 35 bp, Artificial Sequence
  Synthetic oligonucleotide
catcggggtacgcttcctttaaaagatcctgtgcc

SEQ ID NO: 2098 - DNA, 36 bp, Artificial Sequence
  Synthetic oligonucleotide
attcatggtgccgtgagaaaataaccatgtacgcaa

SEQ ID NO: 2099 - DNA, 35 bp, Artificial Sequence
  Synthetic oligonucleotide
atttccataccattgtaggccttctcgtatcgtaa

SEQ ID NO: 2100 - DNA, 38 bp, Artificial Sequence
  Synthetic oligonucleotide
cccatagggcactttttacacccctcgcatactattga

SEQ ID NO: 2101 - DNA, 37 bp, Artificial Sequence
  Synthetic oligonucleotide
ccgtgatgcagatgaatgtacggacgtctgccggtga

SEQ ID NO: 2102 - DNA, 38 bp, Artificial Sequence
  Synthetic oligonucleotide
cccaccgagggcaggtggtgacgtttccccagccttga

SEQ ID NO: 2103 - DNA, 38 bp, Artificial Sequence
  Synthetic oligonucleotide
cccagacaactaccgcggagtagcggaagccgtactga

SEQ ID NO: 2104 - DNA, 36 bp, Artificial Sequence
  Synthetic oligonucleotide
ccgcgcatcacattgggctctgggatgcccgctgca

SEQ ID NO: 2105 - DNA, 35 bp, Artificial Sequence
  Synthetic oligonucleotide
cctagaccacgtgtgtgtcccgggtagggaagtct

SEQ ID NO: 2106 - DNA, 37 bp, Artificial Sequence; identical to SEQ ID NO: 1587
  Synthetic oligonucleotide

SEQ ID NO: 2107 - DNA, 36 bp, Artificial Sequence; identical to SEQ ID NO: 2008
  Synthetic oligonucleotide

SEQ ID NO: 2108 - DNA, 37 bp, Artificial Sequence
  Synthetic oligonucleotide
ccccaccgcgcacaccccgaactttacatatgcatga

SEQ ID NO: 2109 - DNA, 38 bp, Artificial Sequence
  Synthetic oligonucleotide
ccacacccattttgactgaacagcctatccggtactga

SEQ ID NO: 2110 - DNA, 36 bp, Artificial Sequence
  Synthetic oligonucleotide
cctgttcaattcatcctccaggttcgtgttacccta

SEQ ID NO: 2111 - DNA, 36 bp, Artificial Sequence
  Synthetic oligonucleotide
cctttcggactagcttctggcccatttggcgccata

SEQ ID NO: 2112 - DNA, 35 bp, Artificial Sequence
  Synthetic oligonucleotide
ctacaattagaagctcggtttcttctgcggtgacg

SEQ ID NO: 2113 - DNA, 38 bp, Artificial Sequence; identical to SEQ ID NO: 1596
  Synthetic oligonucleotide

SEQ ID NO: 2114 - DNA, 35 bp, Artificial Sequence
  Synthetic oligonucleotide
cgcgggggcctatatgctgtttccaccgctagtta

SEQ ID NO: 2115 - DNA, 35 bp, Artificial Sequence
  Synthetic oligonucleotide
cgctggctgcacgcacgcctgggcgcactgcccta

SEQ ID NO: 2116 - DNA, 35 bp, Artificial Sequence
  Synthetic oligonucleotide
cgtataggttaatacgtactggagcccggagggga

SEQ ID NO: 2117 - DNA, 37 bp, Artificial Sequence
  Synthetic oligonucleotide
cctgaatgggcggtccgcacttcgttagtatcccaga

SEQ ID NO: 2118 - DNA, 35 bp, Artificial Sequence
  Synthetic oligonucleotide
ctcaacgtagtctgcggagttactccagaatgacg

SEQ ID NO: 2119 - DNA, 38 bp, Artificial Sequence
  Synthetic oligonucleotide
gaacttcgcggtgactcgtgcccttcgttgtcctttga

SEQ ID NO: 2120 - DNA, 35 bp, Artificial Sequence
  Synthetic oligonucleotide
gaaccatcattggcttcatttagctattctacacc

SEQ ID NO: 2121 - DNA, 38 bp, Artificial Sequence
  Synthetic oligonucleotide
ctgtccttaaatggaaggtcattttggctcaggtctga

SEQ ID NO: 2122 - DNA, 37 bp, Artificial Sequence
  Synthetic oligonucleotide
gacacgggggcaaaggtggtttgtgtaccccgtacga

SEQ ID NO: 2123 - DNA, 37 bp, Artificial Sequence
  Synthetic oligonucleotide
gaaggtcatcggactgttctgtcaatccccctttgga

SEQ ID NO: 2124 - DNA, 35 bp, Artificial Sequence
  Synthetic oligonucleotide
gagctcaaatcggggactactgcattgtctactcg

SEQ ID NO: 2125 - DNA, 37 bp, Artificial Sequence; identical to SEQ ID NO: 1595
  Synthetic oligonucleotide

SEQ ID NO: 2126 - DNA, 38 bp, Artificial Sequence
  Synthetic oligonucleotide
gacgccttgaaagcgacgcctgatactcgggggcctga

SEQ ID NO: 2127 - DNA, 37 bp, Artificial Sequence
  Synthetic oligonucleotide
gagggccccaagtcaccgctgtagttctaggcccaga

SEQ ID NO: 2128 - DNA, 35 bp, Artificial Sequence
  Synthetic oligonucleotide
gacggtcgtactggagcatcctgagactgttcgag

SEQ ID NO: 2129 - DNA, 37 bp, Artificial Sequence; identical to SEQ ID NO: 1767
  Synthetic oligonucleotide

SEQ ID NO: 2130 - DNA, 35 bp, Artificial Sequence
  Synthetic oligonucleotide
gagtacaggtccggcgccctatcgagaaaggaaaa

SEQ ID NO: 2131 - DNA, 38 bp, Artificial Sequence
  Synthetic oligonucleotide
gagtactgccatgaggccagaggtaagaagccgaatga

SEQ ID NO: 2132 - DNA, 35 bp, Artificial Sequence
  Synthetic oligonucleotide
gagtacagttggattccgcccttgtatctgtacga

SEQ ID NO: 2133 - DNA, 37 bp, Artificial Sequence
  Synthetic oligonucleotide
gagtacctacccgtcgaatattgagattcgggaacga

SEQ ID NO: 2134 - DNA, 35 bp, Artificial Sequence
  Synthetic oligonucleotide
gagtctcatacccctgaatatgtttttatgctttc

SEQ ID NO: 2135 - DNA, 36 bp, Artificial Sequence
  Synthetic oligonucleotide
gagtggctcaaccagggtccagaattacaaaaaata

SEQ ID NO: 2136 - DNA, 36 bp, Artificial Sequence
  Synthetic oligonucleotide
gcaatgtcccctgttttctactaactctgatcttga

SEQ ID NO: 2137 - DNA, 36 bp, Artificial Sequence
  Synthetic oligonucleotide
gcagttctaaaggtggaagaatccaaatgacccaga

SEQ ID NO: 2138 - DNA, 35 bp, Artificial Sequence
  Synthetic oligonucleotide
gcaccttctcctttaattcccagccaataaccatc

SEQ ID NO: 2139 - DNA, 36 bp, Artificial Sequence
  Synthetic oligonucleotide
gatgtaacgggtctgcggggagtttgtcatgcggga

SEQ ID NO: 2140 - DNA, 35 bp, Artificial Sequence
  Synthetic oligonucleotide
gccatcatattcattattccatgcctccccatccc

SEQ ID NO: 2141 - DNA, 35 bp, Artificial Sequence; identical to SEQ ID NO: 2014
  Synthetic oligonucleotide

SEQ ID NO: 2142 - DNA, 36 bp, Artificial Sequence
  Synthetic oligonucleotide
gcaatgaacacctacacatacctgccttcacgatta

SEQ ID NO: 2143 - DNA, 36 bp, Artificial Sequence
  Synthetic oligonucleotide
gccctcacttcaacgtttcataactctacattaata

SEQ ID NO: 2144 - DNA, 38 bp, Artificial Sequence
  Synthetic oligonucleotide
gcgccgatggggcatcggtcgcgacagtcccgccgtga

SEQ ID NO: 2145 - DNA, 36 bp, Artificial Sequence
  Synthetic oligonucleotide
gcgttccccttggacaatatcactttcttatcgtaa

SEQ ID NO: 2146 - DNA, 35 bp, Artificial Sequence; identical to SEQ ID NO: 1600
  Synthetic oligonucleotide

SEQ ID NO: 2147 - DNA, 36 bp, Artificial Sequence
  Synthetic oligonucleotide
gcctctgccaagcaattcatcttaacgacctctcta

SEQ ID NO: 2148 - DNA, 35 bp, Artificial Sequence
  Synthetic oligonucleotide
gccgccggagcacggctgtctttatacgcactgta

SEQ ID NO: 2149 - DNA, 36 bp, Artificial Sequence; identical to SEQ ID NO: 2041
  Synthetic oligonucleotide

SEQ ID NO: 2150 - DNA, 38 bp, Artificial Sequence
  Synthetic oligonucleotide
gcgtacatagatctaggctttccatccaggatatgtga

SEQ ID NO: 2151 - DNA, 36 bp, Artificial Sequence
  Synthetic oligonucleotide
gcgccggcatactccttatattccactatccctgta

SEQ ID NO: 2152 - DNA, 38 bp, Artificial Sequence
  Synthetic oligonucleotide
gctaacgtactctttttttcaacttcactgactattga

SEQ ID NO: 2153 - DNA, 38 bp, Artificial Sequence
  Synthetic oligonucleotide
gctcccgaattgttttcctattaatcgttttcccatga

SEQ ID NO: 2154 - DNA, 36 bp, Artificial Sequence
  Synthetic oligonucleotide
gctgaacaggtcacggtcccccccacacgttaacta

SEQ ID NO: 2155 - DNA, 37 bp, Artificial Sequence
  Synthetic oligonucleotide
gctatacgactgcaagggtctgaccgcagggaattga

SEQ ID NO: 2156 - DNA, 36 bp, Artificial Sequence
  Synthetic oligonucleotide
gcttccgtatcaagagtggctcgcacccacagagta

SEQ ID NO: 2157 - DNA, 35 bp, Artificial Sequence
  Synthetic oligonucleotide
ggattacgtacccgactttttttctggttttcttt

SEQ ID NO: 2158 - DNA, 36 bp, Artificial Sequence
  Synthetic oligonucleotide
gggaccggaccctgtccttggtcgtttgatccacga

SEQ ID NO: 2159 - DNA, 38 bp, Artificial Sequence
  Synthetic oligonucleotide
ggtatttttttgtgctaatctcgccgaatcgtacctga

SEQ ID NO: 2160 - DNA, 36 bp, Artificial Sequence
  Synthetic oligonucleotide
ggctcaccgactccttactttgctggtactacctta

SEQ ID NO: 2161 - DNA, 37 bp, Artificial Sequence
  Synthetic oligonucleotide
gggaacgtaaggttttggtgaacagagggtagtaaga

SEQ ID NO: 2162 - DNA, 38 bp, Artificial Sequence
  Synthetic oligonucleotide
ggtgcttgtccctgtctctacgtaacttttgaagttga

SEQ ID NO: 2163 - DNA, 38 bp, Artificial Sequence; identical to SEQ ID NO: 1601
  Synthetic oligonucleotide

SEQ ID NO: 2164 - DNA, 35 bp, Artificial Sequence
  Synthetic oligonucleotide
ggggtccttttccatcacacatgtccagttccgta

SEQ ID NO: 2165 - DNA, 35 bp, Artificial Sequence
  Synthetic oligonucleotide
ggccttcttaccgactggggcttcgggttttacgt

SEQ ID NO: 2166 - DNA, 37 bp, Artificial Sequence
  Synthetic oligonucleotide
gtgggcccgcattgaaaccgcattcgtagagcctgga

SEQ ID NO: 2167 - DNA, 35 bp, Artificial Sequence; identical to SEQ ID NO: 2042
  Synthetic oligonucleotide

SEQ ID NO: 2168 - DNA, 37 bp, Artificial Sequence
  Synthetic oligonucleotide
gtacttgccgggttacgcagcgcgtccctcttcgcga

SEQ ID NO: 2169 - DNA, 37 bp, Artificial Sequence
  Synthetic oligonucleotide
gtgagctttacgtaatgcggtagttcgtactaacgga

SEQ ID NO: 2170 - DNA, 36 bp, Artificial Sequence; identical to SEQ ID NO: 1598
  Synthetic oligonucleotide

SEQ ID NO: 2171 - DNA, 38 bp, Artificial Sequence
  Synthetic oligonucleotide
gtcgcctatcccagtgcttcgaggggcgacgtgtctga

SEQ ID NO: 2172 - DNA, 37 bp, Artificial Sequence
  Synthetic oligonucleotide
gtgtacatttccgcgcaagctactcagttttttttga

SEQ ID NO: 2173 - DNA, 35 bp, Artificial Sequence
  Synthetic oligonucleotide
gtttactcctgtaccgtgaggtgaagggaaagcaa

SEQ ID NO: 2174 - DNA, 36 bp, Artificial Sequence; identical to SEQ ID NO: 2048
  Synthetic oligonucleotide

SEQ ID NO: 2175 - DNA, 37 bp, Artificial Sequence
  Synthetic oligonucleotide
gttttttactatggttcatctaggattccagtttaga

SEQ ID NO: 2176 - DNA, 36 bp, Artificial Sequence
  Synthetic oligonucleotide
gttctttcacggacggcctcctttccgatctattca

SEQ ID NO: 2177 - DNA, 36 bp, Artificial Sequence; identical to SEQ ID NO: 1602
  Synthetic oligonucleotide

SEQ ID NO: 2178 - DNA, 37 bp, Artificial Sequence
  Synthetic oligonucleotide
gttccgggctctttgtgtagtggtgagcacggcacga

SEQ ID NO: 2179 - DNA, 37 bp, Artificial Sequence
  Synthetic oligonucleotide
taaatgcccggttcattgaatcttcacaaagatggga

SEQ ID NO: 2180 - DNA, 36 bp, Artificial Sequence; identical to SEQ ID NO: 1603
  Synthetic oligonucleotide

SEQ ID NO: 2181 - DNA, 38 bp, Artificial Sequence
  Synthetic oligonucleotide
tacaccatgatacttacatctagcaaccttttttttga

SEQ ID NO: 2182 - DNA, 35 bp, Artificial Sequence
  Synthetic oligonucleotide
taaccgttcgctgggttccagtcccttgttaagcc

SEQ ID NO: 2183 - DNA, 36 bp, Artificial Sequence
  Synthetic oligonucleotide
tagtgttaaacgtgagtgcacttaatcaccctggta

SEQ ID NO: 2184 - DNA, 36 bp, Artificial Sequence
  Synthetic oligonucleotide
taccttgacctgcatcggttctcttcataatcctaa

SEQ ID NO: 2185 - DNA, 38 bp, Artificial Sequence
  Synthetic oligonucleotide
tagtcctgcactgttttacagttcttggtaatatttga

SEQ ID NO: 2186 - DNA, 35 bp, Artificial Sequence
  Synthetic oligonucleotide
tacttcaacacctcgctcgttacataccaatttct

SEQ ID NO: 2187 - DNA, 36 bp, Artificial Sequence; identical to SEQ ID NO: 1638
  Synthetic oligonucleotide

SEQ ID NO: 2188 - DNA, 35 bp, Artificial Sequence
  Synthetic oligonucleotide
tcatcgtcgcgtggccggtaggctgggaaatcctg

SEQ ID NO: 2189 - DNA, 37 bp, Artificial Sequence
  Synthetic oligonucleotide
tcacggatgcgaatcaaatgaactacctaagtccgga

SEQ ID NO: 2190 - DNA, 36 bp, Artificial Sequence; identical to SEQ ID NO: 2038
  Synthetic oligonucleotide

SEQ ID NO: 2191 - DNA, 35 bp, Artificial Sequence; identical to SEQ ID NO: 1777
  Synthetic oligonucleotide

SEQ ID NO: 2192 - DNA, 37 bp, Artificial Sequence
  Synthetic oligonucleotide
tccagccacatggatgaacagtgggccttttcacgga

SEQ ID NO: 2193 - DNA, 37 bp, Artificial Sequence; identical to SEQ ID NO: 1639
  Synthetic oligonucleotide

SEQ ID NO: 2194 - DNA, 38 bp, Artificial Sequence
  Synthetic oligonucleotide
tccttccgacgataacttacgtgtgacacgcgtactga

SEQ ID NO: 2195 - DNA, 38 bp, Artificial Sequence; identical to SEQ ID NO: 1608
  Synthetic oligonucleotide

SEQ ID NO: 2196 - DNA, 38 bp, Artificial Sequence
  Synthetic oligonucleotide
tcccgagtttgtcgatctcgagtggggcccttacctga

SEQ ID NO: 2197 - DNA, 36 bp, Artificial Sequence
  Synthetic oligonucleotide
tccctgtaacagggtctctctctttatatattctca

SEQ ID NO: 2198 - DNA, 37 bp, Artificial Sequence
  Synthetic oligonucleotide
tcgttcctcctttcgggtccgtgaggatccggaacga

SEQ ID NO: 2199 - DNA, 36 bp, Artificial Sequence; identical to SEQ ID NO: 1604
  Synthetic oligonucleotide

SEQ ID NO: 2200 - DNA, 37 bp, Artificial Sequence
  Synthetic oligonucleotide
tctcctttccaacgggacgctgtgttcccctcagtga

SEQ ID NO: 2201 - DNA, 35 bp, Artificial Sequence
  Synthetic oligonucleotide
tctgcactaccgtgaggtatggtgataggtggcga

SEQ ID NO: 2202 - DNA, 36 bp, Artificial Sequence
  Synthetic oligonucleotide
tcgggccagatcgcattcgtagttgctgtttccgta

SEQ ID NO: 2203 - DNA, 37 bp, Artificial Sequence
  Synthetic oligonucleotide
tgcacttaattccacttttccacccttttcactttga

SEQ ID NO: 2204 - DNA, 37 bp, Artificial Sequence
  Synthetic oligonucleotide
tgcacataattccacctttccacccttttcactttga

SEQ ID NO: 2205 - DNA, 38 bp, Artificial Sequence
  Synthetic oligonucleotide
tgagcatcttcacacgcatggctccacctcataaatga

SEQ ID NO: 2206 - DNA, 36 bp, Artificial Sequence; identical to SEQ ID NO: 1750
  Synthetic oligonucleotide

SEQ ID NO: 2207 - DNA, 37 bp, Artificial Sequence
  Synthetic oligonucleotide
tggtctgcacacgcacgtcgcctcttggggttatgga

SEQ ID NO: 2208 - DNA, 38 bp, Artificial Sequence
  Synthetic oligonucleotide
tgtagttttgcaatctatgggctaggaccatgtcatga

SEQ ID NO: 2209 - DNA, 37 bp, Artificial Sequence
  Synthetic oligonucleotide
tgctgttctcctggcgataggagattagccggacgga

SEQ ID NO: 2210 - DNA, 36 bp, Artificial Sequence
  Synthetic oligonucleotide
tgctaagagggctaaggccacacacttaataactta

SEQ ID NO: 2211 - DNA, 35 bp, Artificial Sequence; identical to SEQ ID NO: 2029
  Synthetic oligonucleotide

SEQ ID NO: 2212 - DNA, 38 bp, Artificial Sequence; identical to SEQ ID NO: 1609
  Synthetic oligonucleotide

SEQ ID NO: 2213 - DNA, 36 bp, Artificial Sequence
  Synthetic oligonucleotide
tggagtactagttccgaggacgtgagggaagactcg

SEQ ID NO: 2214 - DNA, 35 bp, Artificial Sequence
  Synthetic oligonucleotide
tggtccctggttccacttcattgagagcagagcat

SEQ ID NO: 2215 - DNA, 36 bp, Artificial Sequence
  Synthetic oligonucleotide
tgctcggatcttcgattcgtgccgcctgacaaatca

SEQ ID NO: 2216 - DNA, 35 bp, Artificial Sequence; identical to SEQ ID NO: 1644
  Synthetic oligonucleotide

SEQ ID NO: 2217 - DNA, 38 bp, Artificial Sequence
  Synthetic oligonucleotide
ttacgatgctcaagggtcccgttcgttcacagatatga

SEQ ID NO: 2218 - DNA, 38 bp, Artificial Sequence
  Synthetic oligonucleotide
ttacaaaccccggtgctctaaagttatcgatctcttga

SEQ ID NO: 2219 - DNA, 35 bp, Artificial Sequence
  Synthetic oligonucleotide
tgttggggggttagcacgggtttatgggttgcttc

SEQ ID NO: 2220 - DNA, 35 bp, Artificial Sequence
  Synthetic oligonucleotide
ttgcagtggagtaagccctgaccgaggagcgacga

SEQ ID NO: 2221 - DNA, 36 bp, Artificial Sequence
  Synthetic oligonucleotide
ttctcgcctacatctatctcaatattgtcctaccga

SEQ ID NO: 2222 - DNA, 36 bp, Artificial Sequence
  Synthetic oligonucleotide
ttgacatgcgatgtgcacagttagttaatttcaaca

SEQ ID NO: 2223 - DNA, 37 bp, Artificial Sequence
  Synthetic oligonucleotide
ttctatttactaaatacaacctttgtagcagacaaga

SEQ ID NO: 2224 - DNA, 36 bp, Artificial Sequence
  Synthetic oligonucleotide
ttccacacttcactgtacccactcttaccagccaca

SEQ ID NO: 2225 - DNA, 36 bp, Artificial Sequence
  Synthetic oligonucleotide
ttcctctagcctccgactggcgtgtgactctaaaga

SEQ ID NO: 2226 - DNA, 35 bp, Artificial Sequence
  Synthetic oligonucleotide
tttccgctatagtgcttctggtacgacgcgtacgg

SEQ ID NO: 2227 - DNA, 38 bp, Artificial Sequence
  Synthetic oligonucleotide
tttatactcatacccgaactgttccacaccgcaactga

SEQ ID NO: 2228 - DNA, 38 bp, Artificial Sequence
  Synthetic oligonucleotide
tttattcgccctttgttgacctacaccacatcacttga

SEQ ID NO: 2229 - DNA, 35 bp, Artificial Sequence; identical to SEQ ID NO: 1605
  Synthetic oligonucleotide

SEQ ID NO: 2230 - DNA, 38 bp, Artificial Sequence
  Synthetic oligonucleotide
ttgtagtttggccctttcgagggccgttgcctggttga

SEQ ID NO: 2231 - DNA, 38 bp, Artificial Sequence
  Synthetic oligonucleotide
tttttgttccataggtacggtctccggaggaatcgtga

SEQ ID NO: 2232 - DNA, 38 bp, Artificial Sequence
  Synthetic oligonucleotide
ttttgctaacgcgacggaggcgccgagagctatgctga

SEQ ID NO: 2233 - DNA, 35 bp, Artificial Sequence; identical to SEQ ID NO: 1599
  Synthetic oligonucleotide

SEQ ID NO: 2234 - DNA, 37 bp, Artificial Sequence; identical to SEQ ID NO: 1649
  Synthetic oligonucleotide

SEQ ID NO: 2235 - DNA, 36 bp, Artificial Sequence; identical to SEQ ID NO: 1651
  Synthetic oligonucleotide

SEQ ID NO: 2236 - DNA, 36 bp, Artificial Sequence; identical to SEQ ID NO: 1652
  Synthetic oligonucleotide

SEQ ID NO: 2237 - DNA, 37 bp, Artificial Sequence
  Synthetic oligonucleotide
aacgcctaactggacagaaaaatcgtacgctaccaga

SEQ ID NO: 2238 - DNA, 38 bp, Artificial Sequence; identical to SEQ ID NO: 1653
  Synthetic oligonucleotide

SEQ ID NO: 2239 - DNA, 38 bp, Artificial Sequence; identical to SEQ ID NO: 1792
  Synthetic oligonucleotide

SEQ ID NO: 2240 - DNA, 35 bp, Artificial Sequence
  Synthetic oligonucleotide
tggactggtcgtggggtgtgaacgaatccaatgtg

SEQ ID NO: 2241 - DNA, 38 bp, Artificial Sequence; identical to SEQ ID NO: 1731
  Synthetic oligonucleotide

SEQ ID NO: 2242 - DNA, 36 bp, Artificial Sequence
  Synthetic oligonucleotide
tgcaccctacccatttagatgtatcagccacgggca

SEQ ID NO: 2243 - DNA, 36 bp, Artificial Sequence
  Synthetic oligonucleotide
aacccgtagtagcacaccctgtctaacccaaatcaa

SEQ ID NO: 2244 - DNA, 35 bp, Artificial Sequence
  Synthetic oligonucleotide
aaacgcgatcttacatcattacaatccctcaaccc

SEQ ID NO: 2245 - DNA, 35 bp, Artificial Sequence
  Synthetic oligonucleotide
aaatcccatcgagcccttaacccagaccaactacg

SEQ ID NO: 2246 - DNA, 38 bp, Artificial Sequence
  Synthetic oligonucleotide
aagaacatgagactgaatatcgtacgcgagtaaaatga

SEQ ID NO: 2247 - DNA, 35 bp, Artificial Sequence
  Synthetic oligonucleotide
aagagtataggtccgagggaggacctactaattac

SEQ ID NO: 2248 - DNA, 38 bp, Artificial Sequence
  Synthetic oligonucleotide
aatttcggttacaccccgctctctatcactatacgtga

SEQ ID NO: 2249 - DNA, 37 bp, Artificial Sequence
  Synthetic oligonucleotide
accactagagtcctcaagaactcatccacccacctga

SEQ ID NO: 2250 - DNA, 35 bp, Artificial Sequence
  Synthetic oligonucleotide
acggtatttgttttttcgattgatggggaagtata

SEQ ID NO: 2251 - DNA, 37 bp, Artificial Sequence
  Synthetic oligonucleotide
accggcgaataacgccaaagcctgcgactggccttga

SEQ ID NO: 2252 - DNA, 35 bp, Artificial Sequence
  Synthetic oligonucleotide
acgcttttaaaaccatacactcgataactataccc

SEQ ID NO: 2253 - DNA, 36 bp, Artificial Sequence
  Synthetic oligonucleotide
accctactattaacccatcaaaagttcgctacccta

SEQ ID NO: 2254 - DNA, 36 bp, Artificial Sequence
  Synthetic oligonucleotide
acgcccatcgtttcgggcctttgtccatttcataca

SEQ ID NO: 2255 - DNA, 35 bp, Artificial Sequence
  Synthetic oligonucleotide
accttcccttcaacgggtgtattccggcgggtagc

SEQ ID NO: 2256 - DNA, 36 bp, Artificial Sequence
  Synthetic oligonucleotide
acttcacccacacaataccatcatcgataactcaaa

SEQ ID NO: 2257 - DNA, 35 bp, Artificial Sequence
  Synthetic oligonucleotide
agcggctaatcactgaagtagccccaggttttgaa

SEQ ID NO: 2258 - DNA, 37 bp, Artificial Sequence
  Synthetic oligonucleotide
agcaggcccaacggcctctgggttagtatccgcgtga

SEQ ID NO: 2259 - DNA, 36 bp, Artificial Sequence
  Synthetic oligonucleotide
agccgatccttgtccccgttgaaggccggatcgaaa

SEQ ID NO: 2260 - DNA, 38 bp, Artificial Sequence
  Synthetic oligonucleotide
aggcatctcaagcgctcggaggtacgcactatttctga

SEQ ID NO: 2261 - DNA, 35 bp, Artificial Sequence
  Synthetic oligonucleotide
agagacggcttcaacgcggctttcgggctctcttc

SEQ ID NO: 2262 - DNA, 35 bp, Artificial Sequence
  Synthetic oligonucleotide
agtacccccttatccctggggcctcccggggtacc

SEQ ID NO: 2263 - DNA, 36 bp, Artificial Sequence
  Synthetic oligonucleotide
atcaacaccattccctatatccaacactaaacgtaa

SEQ ID NO: 2264 - DNA, 37 bp, Artificial Sequence
  Synthetic oligonucleotide
agtttctcgacaggggcactctggccacgtggctgga

SEQ ID NO: 2265 - DNA, 35 bp, Artificial Sequence
  Synthetic oligonucleotide
aggggatactcagaacccgatgtaaatcttaagaa

SEQ ID NO: 2266 - DNA, 37 bp, Artificial Sequence
  Synthetic oligonucleotide
atcttcccaccacttgtgccttatcattgccccccga

SEQ ID NO: 2267 - DNA, 35 bp, Artificial Sequence; identical to SEQ ID NO: 1892
  Synthetic oligonucleotide

SEQ ID NO: 2268 - DNA, 35 bp, Artificial Sequence
  Synthetic oligonucleotide
ccagctagaccagacgaatgtggaactgaatctgc

SEQ ID NO: 2269 - DNA, 35 bp, Artificial Sequence
  Synthetic oligonucleotide
ccctaaaagcgacccactcagcggatttgacttgc

SEQ ID NO: 2270 - DNA, 35 bp, Artificial Sequence
  Synthetic oligonucleotide
ccaccccaccgagaggggctcatggcatacgctga

SEQ ID NO: 2271 - DNA, 36 bp, Artificial Sequence
  Synthetic oligonucleotide
cccgggaacacggtccgttcgtaggagaacgaccaa

SEQ ID NO: 2272 - DNA, 38 bp, Artificial Sequence
  Synthetic oligonucleotide
ccatgctctccggaggccgttttacggagggagcgtga

SEQ ID NO: 2273 - DNA, 36 bp, Artificial Sequence; identical to SEQ ID NO: 1651
  Synthetic oligonucleotide

SEQ ID NO: 2274 - DNA, 37 bp, Artificial Sequence
  Synthetic oligonucleotide
cgcttccgctacgtaccccccgggcgttcgccttgga

SEQ ID NO: 2275 - DNA, 37 bp, Artificial Sequence
  Synthetic oligonucleotide
ctcaaagcaacttgctggtgccagcaccgaagtccga

SEQ ID NO: 2276 - DNA, 38 bp, Artificial Sequence
  Synthetic oligonucleotide
ccttacatttatgttgaggcccccggtaattattgtga

SEQ ID NO: 2277 - DNA, 35 bp, Artificial Sequence
  Synthetic oligonucleotide
ctggtaccctgcgattcgggtctcgacttggttcc

SEQ ID NO: 2278 - DNA, 37 bp, Artificial Sequence
  Synthetic oligonucleotide
gaacgtacgccttcctcgtaataattggaaccttcta

SEQ ID NO: 2279 - DNA, 35 bp, Artificial Sequence
  Synthetic oligonucleotide
cttcgccatcttccggtcggcgaaaaacaggccac

SEQ ID NO: 2280 - DNA, 35 bp, Artificial Sequence; identical to SEQ ID NO: 1918
  Synthetic oligonucleotide

SEQ ID NO: 2281 - DNA, 37 bp, Artificial Sequence
  Synthetic oligonucleotide
gaggacattggaccgccccatacgaacgccactctga

SEQ ID NO: 2282 - DNA, 36 bp, Artificial Sequence
  Synthetic oligonucleotide
gagtacgactaattatcttaacaacatttatgaaca

SEQ ID NO: 2283 - DNA, 35 bp, Artificial Sequence
  Synthetic oligonucleotide
gagtagttgcatcgaagcggaggcttttccggatc

SEQ ID NO: 2284 - DNA, 36 bp, Artificial Sequence
  Synthetic oligonucleotide
gcactgtccccggttttctactaactctgatcttga

SEQ ID NO: 2285 - DNA, 38 bp, Artificial Sequence
  Synthetic oligonucleotide
gcgtcctgcactgttttacagttcttggtaatatttga

SEQ ID NO: 2286 - DNA, 37 bp, Artificial Sequence
  Synthetic oligonucleotide
ggcacacacctagcctgaaaggtcctttaacattgga

SEQ ID NO: 2287 - DNA, 37 bp, Artificial Sequence
  Synthetic oligonucleotide
ggcccagtactcacgctagaccctcgaggggactcga

SEQ ID NO: 2288 - DNA, 35 bp, Artificial Sequence
  Synthetic oligonucleotide
ggacccgtaccgacacctatagccttcccccagag

SEQ ID NO: 2289 - DNA, 37 bp, Artificial Sequence
  Synthetic oligonucleotide
ggtctagcgggtacaccttctggggttcggtttgtga

SEQ ID NO: 2290 - DNA, 37 bp, Artificial Sequence; identical to SEQ ID NO: 1939
  Synthetic oligonucleotide

SEQ ID NO: 2291 - DNA, 37 bp, Artificial Sequence
  Synthetic oligonucleotide
gggaactcgcaaaatttcttgaccccaaggtacccga

SEQ ID NO: 2292 - DNA, 37 bp, Artificial Sequence
  Synthetic oligonucleotide
ggtccttgagcatcaaatcgctaagggggtccgcaga

SEQ ID NO: 2293 - DNA, 37 bp, Artificial Sequence
  Synthetic oligonucleotide
gtctggtttttatattcagagccctgtttgggttaga

SEQ ID NO: 2294 - DNA, 35 bp, Artificial Sequence
  Synthetic oligonucleotide
taaggatagcgctcggcctttattgatacttgttt

SEQ ID NO: 2295 - DNA, 38 bp, Artificial Sequence
  Synthetic oligonucleotide
taaccgcatcactttcacttgacactaatacctcatga

SEQ ID NO: 2296 - DNA, 36 bp, Artificial Sequence
  Synthetic oligonucleotide
taatatccctgctctcgaacacttcgctttaaacta

SEQ ID NO: 2297 - DNA, 36 bp, Artificial Sequence; identical to SEQ ID NO: 1719
  Synthetic oligonucleotide

SEQ ID NO: 2298 - DNA, 36 bp, Artificial Sequence
  Synthetic oligonucleotide
gttccgctccagggaacagaggatcagggagttcga

SEQ ID NO: 2299 - DNA, 37 bp, Artificial Sequence
  Synthetic oligonucleotide
tatatccgcatcccgaagcatagatctcaagtactga

SEQ ID NO: 2300 - DNA, 38 bp, Artificial Sequence
  Synthetic oligonucleotide
tatacacccgaaaagcgggttatcaaaaattatcatga

SEQ ID NO: 2301 - DNA, 35 bp, Artificial Sequence
  Synthetic oligonucleotide
tactatcttctagttcaacagccacttatgaccca

SEQ ID NO: 2302 - DNA, 35 bp, Artificial Sequence
  Synthetic oligonucleotide
tacgccccttaacctctaaccagcgagggtagttc

SEQ ID NO: 2303 - DNA, 36 bp, Artificial Sequence
  Synthetic oligonucleotide
tcaacgaccgcgaggttgaacgacgtggggactgta

SEQ ID NO: 2304 - DNA, 38 bp, Artificial Sequence
  Synthetic oligonucleotide
tattatgttcacggccggaggggggccgggggatgcga

SEQ ID NO: 2305 - DNA, 36 bp, Artificial Sequence
  Synthetic oligonucleotide
tcgcatacaacaaaattacgcctaaccataacacca

SEQ ID NO: 2306 - DNA, 38 bp, Artificial Sequence
  Synthetic oligonucleotide
tgaagtactcgtaagttttatagtttttcattctatga

SEQ ID NO: 2307 - DNA, 36 bp, Artificial Sequence
  Synthetic oligonucleotide
tgacaaaagtcccctgaggggtggactcgtgaccca

SEQ ID NO: 2308 - DNA, 35 bp, Artificial Sequence
  Synthetic oligonucleotide
tgcgggtgcatgccgagtgagccgaacgacccatc

SEQ ID NO: 2309 - DNA, 38 bp, Artificial Sequence
  Synthetic oligonucleotide
tggccggggtttggccccagaaagatacgccggggtga

SEQ ID NO: 2310 - DNA, 36 bp, Artificial Sequence
  Synthetic oligonucleotide
tggacctactacgcttgggcaacgcgggggccccta

SEQ ID NO: 2311 - DNA, 38 bp, Artificial Sequence
  Synthetic oligonucleotide
tggacgattttgccaccgttagtacaacccgggggtga

SEQ ID NO: 2312 - DNA, 35 bp, Artificial Sequence
  Synthetic oligonucleotide
tgtagcccaggagaaaccctaccccaacggacgcg

SEQ ID NO: 2313 - DNA, 36 bp, Artificial Sequence
  Synthetic oligonucleotide
tgtggcgagggccgcctccaggcatgaaatgtatca

SEQ ID NO: 2314 - DNA, 38 bp, Artificial Sequence
  Synthetic oligonucleotide
tgtttgcttcatagtaacgttgagactgcataaactga

SEQ ID NO: 2315 - DNA, 35 bp, Artificial Sequence
  Synthetic oligonucleotide
tgttagttccactttccgataatccgcctccctta

SEQ ID NO: 2316 - DNA, 35 bp, Artificial Sequence
  Synthetic oligonucleotide
ttctcgacggccttccaggcgggagacaaagctgc

SEQ ID NO: 2317 - DNA, 38 bp, Artificial Sequence
  Synthetic oligonucleotide
ttcatggacgaaacgggcggcggacatttattcgctga

SEQ ID NO: 2318 - DNA, 38 bp, Artificial Sequence
  Synthetic oligonucleotide
tttgctccggtgtttgaccctcgcagtccggagagtga

SEQ ID NO: 2319 - DNA, 35 bp, Artificial Sequence; identical to SEQ ID NO: 2007
  Synthetic oligonucleotide

SEQ ID NO: 2320 - DNA, 36 bp, Artificial Sequence; identical to SEQ ID NO: 1590
  Synthetic oligonucleotide

SEQ ID NO: 2321 - DNA, 35 bp, Artificial Sequence; identical to SEQ ID NO: 1591
  Synthetic oligonucleotide

SEQ ID NO: 2322 - DNA, 38 bp, Artificial Sequence; identical to SEQ ID NO: 2016
  Synthetic oligonucleotide

SEQ ID NO: 2323 - DNA, 37 bp, Artificial Sequence
  Synthetic oligonucleotide
aacgcgctggtcttcgtgtattgtttcgcgctaagga

SEQ ID NO: 2324 - DNA, 35 bp, Artificial Sequence
  Synthetic oligonucleotide
aactatcattcatcttggtgtgatctacctttgtt

SEQ ID NO: 2325 - DNA, 37 bp, Artificial Sequence; identical to SEQ ID NO: 2005
  Synthetic oligonucleotide

SEQ ID NO: 2326 - DNA, 36 bp, Artificial Sequence
  Synthetic oligonucleotide
cttctatatatctcattcttccggtttattcaatca

SEQ ID NO: 2327 - DNA, 36 bp, Artificial Sequence; identical to SEQ ID NO: 1586
  Synthetic oligonucleotide

SEQ ID NO: 2328 - DNA, 37 bp, Artificial Sequence; identical to SEQ ID NO: 1595
  Synthetic oligonucleotide

SEQ ID NO: 2329 - DNA, 35 bp, Artificial Sequence; identical to SEQ ID NO: 1740
  Synthetic oligonucleotide

SEQ ID NO: 2330 - DNA, 35 bp, Artificial Sequence
  Synthetic oligonucleotide
acgcttcttttacttagctaaccattattcattgt

SEQ ID NO: 2331 - DNA, 37 bp, Artificial Sequence; identical to SEQ ID NO: 1587
  Synthetic oligonucleotide

SEQ ID NO: 2332 - DNA, 38 bp, Artificial Sequence; identical to SEQ ID NO: 2012
  Synthetic oligonucleotide

SEQ ID NO: 2333 - DNA, 35 bp, Artificial Sequence; identical to SEQ ID NO: 2014
  Synthetic oligonucleotide

SEQ ID NO: 2334 - DNA, 38 bp, Artificial Sequence; identical to SEQ ID NO: 1596
  Synthetic oligonucleotide

SEQ ID NO: 2335 - DNA, 35 bp, Artificial Sequence; identical to SEQ ID NO: 2028
  Synthetic oligonucleotide

SEQ ID NO: 2336 - DNA, 35 bp, Artificial Sequence; identical to SEQ ID NO: 1644
  Synthetic oligonucleotide

SEQ ID NO: 2337 - DNA, 36 bp, Artificial Sequence; identical to SEQ ID NO: 1638
  Synthetic oligonucleotide

SEQ ID NO: 2338 - DNA, 36 bp, Artificial Sequence; identical to SEQ ID NO: 2038
  Synthetic oligonucleotide

SEQ ID NO: 2339 - DNA, 35 bp, Artificial Sequence; identical to SEQ ID NO: 1606
  Synthetic oligonucleotide

SEQ ID NO: 2340 - DNA, 35 bp, Artificial Sequence; identical to SEQ ID NO: 2045
  Synthetic oligonucleotide

SEQ ID NO: 2341 - DNA, 38 bp, Artificial Sequence
  Synthetic oligonucleotide
ttctgccggtttttacggtcaaattctagatagtttga

SEQ ID NO: 2342 - DNA, 36 bp, Artificial Sequence; identical to SEQ ID NO: 1769
  Synthetic oligonucleotide

SEQ ID NO: 2343 - DNA, 38 bp, Artificial Sequence; identical to SEQ ID NO: 1601
  Synthetic oligonucleotide

SEQ ID NO: 2344 - DNA, 36 bp, Artificial Sequence; identical to SEQ ID NO: 1604
  Synthetic oligonucleotide

SEQ ID NO: 2345 - DNA, 35 bp, Artificial Sequence; identical to SEQ ID NO: 1605
  Synthetic oligonucleotide

SEQ ID NO: 2346 - DNA, 35 bp, Artificial Sequence; identical to SEQ ID NO: 2042
  Synthetic oligonucleotide

SEQ ID NO: 2347 - DNA, 36 bp, Artificial Sequence; identical to SEQ ID NO: 2043
  Synthetic oligonucleotide

SEQ ID NO: 2348 - DNA, 36 bp, Artificial Sequence; identical to SEQ ID NO: 2047
  Synthetic oligonucleotide

SEQ ID NO: 2349 - DNA, 36 bp, Artificial Sequence; identical to SEQ ID NO: 1611
  Synthetic oligonucleotide

SEQ ID NO: 2350 - DNA, 36 bp, Artificial Sequence; identical to SEQ ID NO: 1750
  Synthetic oligonucleotide

SEQ ID NO: 2351 - DNA, 36 bp, Artificial Sequence; identical to SEQ ID NO: 1598
  Synthetic oligonucleotide

SEQ ID NO: 2352 - DNA, 35 bp, Artificial Sequence; identical to SEQ ID NO: 1599
  Synthetic oligonucleotide

SEQ ID NO: 2353 - DNA, 37 bp, Artificial Sequence; identical to SEQ ID NO: 1649
  Synthetic oligonucleotide

SEQ ID NO: 2354 - DNA, 36 bp, Artificial Sequence; identical to SEQ ID NO: 1603
  Synthetic oligonucleotide

SEQ ID NO: 2355 - DNA, 36 bp, Artificial Sequence; identical to SEQ ID NO: 2048
  Synthetic oligonucleotide

SEQ ID NO: 2356 - DNA, 38 bp, Artificial Sequence; identical to SEQ ID NO: 1609
  Synthetic oligonucleotide

SEQ ID NO: 2357 - DNA, 35 bp, Artificial Sequence
  Synthetic oligonucleotide
aaatcccaacgagcccttaacccagaccaactaca

SEQ ID NO: 2358 - DNA, 37 bp, Artificial Sequence; identical to SEQ ID NO: 2055
  Synthetic oligonucleotide

SEQ ID NO: 2359 - DNA, 37 bp, Artificial Sequence
  Synthetic oligonucleotide
aacgtagtgaggtattccgcaccccctttattcgtga

SEQ ID NO: 2360 - DNA, 36 bp, Artificial Sequence
  Synthetic oligonucleotide
aacccaattcacatacactctcacccacactaaaca

SEQ ID NO: 2361 - DNA, 38 bp, Artificial Sequence
  Synthetic oligonucleotide
aaaaccgctcgcttaagctttctttgactttttgatga

SEQ ID NO: 2362 - DNA, 36 bp, Artificial Sequence
  Synthetic oligonucleotide
aatgcacaaccgcgctgaaaatcacctttatcgaaa

SEQ ID NO: 2363 - DNA, 37 bp, Artificial Sequence
  Synthetic oligonucleotide
aattgatctttttgtttacgaattcgtattccattga

SEQ ID NO: 2364 - DNA, 38 bp, Artificial Sequence
  Synthetic oligonucleotide
aatcaccacaaatactttcgcctatctcgcttatctga

SEQ ID NO: 2365 - DNA, 36 bp, Artificial Sequence
  Synthetic oligonucleotide
aacttgtcttatgctctccaccttacctattaacaa

SEQ ID NO: 2366 - DNA, 37 bp, Artificial Sequence
  Synthetic oligonucleotide
aactcctgatatcgtttcttcgtttccgccaattcta

SEQ ID NO: 2367 - DNA, 35 bp, Artificial Sequence; identical to SEQ ID NO: 2061
  Synthetic oligonucleotide

SEQ ID NO: 2368 - DNA, 38 bp, Artificial Sequence; identical to SEQ ID NO: 2024
  Synthetic oligonucleotide

SEQ ID NO: 2369 - DNA, 36 bp, Artificial Sequence
  Synthetic oligonucleotide
accgggaacatttctgttgtttcatttcatcactaa

SEQ ID NO: 2370 - DNA, 35 bp, Artificial Sequence; identical to SEQ ID NO: 2330
  Synthetic oligonucleotide

SEQ ID NO: 2371 - DNA, 37 bp, Artificial Sequence; identical to SEQ ID NO: 2067
  Synthetic oligonucleotide

SEQ ID NO: 2372 - DNA, 35 bp, Artificial Sequence
  Synthetic oligonucleotide
accgacgcactctcctttctaaaatctatctactt

SEQ ID NO: 2373 - DNA, 35 bp, Artificial Sequence
  Synthetic oligonucleotide
acgttaatttcccaaaaacgatcccactttgaaca

SEQ ID NO: 2374 - DNA, 36 bp, Artificial Sequence
  Synthetic oligonucleotide
actcgcccttcacgactttatcaaaatgtactttca

SEQ ID NO: 2375 - DNA, 38 bp, Artificial Sequence; identical to SEQ ID NO: 2071
  Synthetic oligonucleotide

SEQ ID NO: 2376 - DNA, 35 bp, Artificial Sequence; identical to SEQ ID NO: 1597
  Synthetic oligonucleotide

SEQ ID NO: 2377 - DNA, 36 bp, Artificial Sequence; identical to SEQ ID NO: 1617
  Synthetic oligonucleotide

SEQ ID NO: 2378 - DNA, 36 bp, Artificial Sequence
  Synthetic oligonucleotide
acttcgcccacacaataccattatcgataactcaaa

SEQ ID NO: 2379 - DNA, 35 bp, Artificial Sequence; identical to SEQ ID NO: 1591
  Synthetic oligonucleotide

SEQ ID NO: 2380 - DNA, 36 bp, Artificial Sequence; identical to SEQ ID NO: 1590
  Synthetic oligonucleotide

SEQ ID NO: 2381 - DNA, 38 bp, Artificial Sequence; identical to SEQ ID NO: 2023
  Synthetic oligonucleotide

SEQ ID NO: 2382 - DNA, 36 bp, Artificial Sequence; identical to SEQ ID NO: 1586
  Synthetic oligonucleotide

SEQ ID NO: 2383 - DNA, 35 bp, Artificial Sequence; identical to SEQ ID NO: 1620
  Synthetic oligonucleotide

SEQ ID NO: 2384 - DNA, 35 bp, Artificial Sequence
  Synthetic oligonucleotide
atatgcccgctccctactcaatatcttcccataca

SEQ ID NO: 2385 - DNA, 35 bp, Artificial Sequence; identical to SEQ ID NO: 1594
  Synthetic oligonucleotide

SEQ ID NO: 2386 - DNA, 37 bp, Artificial Sequence
  Synthetic oligonucleotide
atgcattatcccagctttaaacgctctacccaccgaa

SEQ ID NO: 2387 - DNA, 36 bp, Artificial Sequence; identical to SEQ ID NO: 2092
  Synthetic oligonucleotide

SEQ ID NO: 2388 - DNA, 35 bp, Artificial Sequence
  Synthetic oligonucleotide
atctgcttgtaagtccccgtgtatacctgttcagt

SEQ ID NO: 2389 - DNA, 35 bp, Artificial Sequence
  Synthetic oligonucleotide
atcactggagtgatagtctgggccctgaaactcct

SEQ ID NO: 2390 - DNA, 36 bp, Artificial Sequence
  Synthetic oligonucleotide
atcaccgtccttatcatacccacttcgttttttata

SEQ ID NO: 2391 - DNA, 35 bp, Artificial Sequence; identical to SEQ ID NO: 1740
  Synthetic oligonucleotide

SEQ ID NO: 2392 - DNA, 37 bp, Artificial Sequence; identical to SEQ ID NO: 2094
  Synthetic oligonucleotide

SEQ ID NO: 2393 - DNA, 36 bp, Artificial Sequence; identical to SEQ ID NO: 2098
  Synthetic oligonucleotide

SEQ ID NO: 2394 - DNA, 37 bp, Artificial Sequence; identical to SEQ ID NO: 1587
  Synthetic oligonucleotide

SEQ ID NO: 2395 - DNA, 38 bp, Artificial Sequence; identical to SEQ ID NO: 2100
  Synthetic oligonucleotide

SEQ ID NO: 2396 - DNA, 35 bp, Artificial Sequence
  Synthetic oligonucleotide
ccagcacactgacttttccttacccacctcctttc

SEQ ID NO: 2397 - DNA, 38 bp, Artificial Sequence
  Synthetic oligonucleotide
ccccgccatggtttcaaatggctgaagctatctattga

SEQ ID NO: 2398 - DNA, 38 bp, Artificial Sequence
  Synthetic oligonucleotide
ccggtatctgcactcgtttggaatcgaccaacccctga

SEQ ID NO: 2399 - DNA, 37 bp, Artificial Sequence
  Synthetic oligonucleotide
ccgtctactgcaacaggaggccaccacggtcttccga

SEQ ID NO: 2400 - DNA, 37 bp, Artificial Sequence
  Synthetic oligonucleotide
cgctcttcttactttattcaatatggtcataaattga

SEQ ID NO: 2401 - DNA, 37 bp, Artificial Sequence
  Synthetic oligonucleotide
cgtttctttatcccaaagtcattcgcatgccctttga

SEQ ID NO: 2402 - DNA, 38 bp, Artificial Sequence; identical to SEQ ID NO: 1596
  Synthetic oligonucleotide

SEQ ID NO: 2403 - DNA, 35 bp, Artificial Sequence
  Synthetic oligonucleotide
cgcgcctccttccccgatgatatgccactgccgca

SEQ ID NO: 2404 - DNA, 35 bp, Artificial Sequence; identical to SEQ ID NO: 2114
  Synthetic oligonucleotide

SEQ ID NO: 2405 - DNA, 37 bp, Artificial Sequence
  Synthetic oligonucleotide
cgcttcttgggcaggaggcgacacaggttcatattga

SEQ ID NO: 2406 - DNA, 35 bp, Artificial Sequence; identical to SEQ ID NO: 2120
  Synthetic oligonucleotide

SEQ ID NO: 2407 - DNA, 37 bp, Artificial Sequence
  Synthetic oligonucleotide
ctgtcccttgtaaggattattcgtaggtatttagtga

SEQ ID NO: 2408 - DNA, 37 bp, Artificial Sequence
  Synthetic oligonucleotide
ctgcggtcacctgcatagtaattaataatatacgtga

SEQ ID NO: 2409 - DNA, 37 bp, Artificial Sequence
  Synthetic oligonucleotide
cttcgctaaatggctgggggaatcatactgccggaga

SEQ ID NO: 2410 - DNA, 35 bp, Artificial Sequence
  Synthetic oligonucleotide
ctcctgcagatcttggtacctcttgttctttcata

SEQ ID NO: 2411 - DNA, 37 bp, Artificial Sequence; identical to SEQ ID NO: 1595
  Synthetic oligonucleotide

SEQ ID NO: 2412 - DNA, 35 bp, Artificial Sequence
  Synthetic oligonucleotide
gaggacttttacttatcaaccccacctttcgaaca

SEQ ID NO: 2413 - DNA, 35 bp, Artificial Sequence
  Synthetic oligonucleotide
gagtacttgactcttgtatattttttctccccctt

SEQ ID NO: 2414 - DNA, 37 bp, Artificial Sequence
  Synthetic oligonucleotide
gatcccgttccttttttaacgatctattttcttttga

SEQ ID NO: 2415 - DNA, 35 bp, Artificial Sequence; identical to SEQ ID NO: 2140
  Synthetic oligonucleotide

SEQ ID NO: 2416 - DNA, 35 bp, Artificial Sequence; identical to SEQ ID NO: 2014
  Synthetic oligonucleotide

SEQ ID NO: 2417 - DNA, 35 bp, Artificial Sequence; identical to SEQ ID NO: 1600
  Synthetic oligonucleotide

SEQ ID NO: 2418 - DNA, 36 bp, Artificial Sequence; identical to SEQ ID NO: 2143
  Synthetic oligonucleotide

SEQ ID NO: 2419 - DNA, 36 bp, Artificial Sequence; identical to SEQ ID NO: 2147
  Synthetic oligonucleotide

SEQ ID NO: 2420 - DNA, 36 bp, Artificial Sequence; identical to SEQ ID NO: 2151
  Synthetic oligonucleotide

SEQ ID NO: 2421 - DNA, 37 bp, Artificial Sequence
  Synthetic oligonucleotide
gcggaatagtccacgggacgctaagcgtggagctcga

SEQ ID NO: 2422 - DNA, 36 bp, Artificial Sequence
  Synthetic oligonucleotide
gcgtccactctatccttgctttaatacatcgttaaa

SEQ ID NO: 2423 - DNA, 38 bp, Artificial Sequence
  Synthetic oligonucleotide
gcctttccaggttcttcttttcgaccgtttatttttga

SEQ ID NO: 2424 - DNA, 38 bp, Artificial Sequence
  Synthetic oligonucleotide
ggccctggtggcaccaagccgcgagcccactcaactga

SEQ ID NO: 2425 - DNA, 35 bp, Artificial Sequence
  Synthetic oligonucleotide
ggtgcccaactggtgcttctccttctttgagacgt

SEQ ID NO: 2426 - DNA, 38 bp, Artificial Sequence
  Synthetic oligonucleotide
gggagtttttatcctacaatgtaaattatcatacttga

SEQ ID NO: 2427 - DNA, 38 bp, Artificial Sequence; identical to SEQ ID NO: 1601
  Synthetic oligonucleotide

SEQ ID NO: 2428 - DNA, 36 bp, Artificial Sequence
  Synthetic oligonucleotide
ggtcccactctgaccatcaattcacctaacttgtaa

SEQ ID NO: 2429 - DNA, 35 bp, Artificial Sequence; identical to SEQ ID NO: 1606
  Synthetic oligonucleotide

SEQ ID NO: 2430 - DNA, 37 bp, Artificial Sequence; identical to SEQ ID NO: 2166
  Synthetic oligonucleotide

SEQ ID NO: 2431 - DNA, 36 bp, Artificial Sequence; identical to SEQ ID NO: 1598
  Synthetic oligonucleotide

SEQ ID NO: 2432 - DNA, 38 bp, Artificial Sequence; identical to SEQ ID NO: 1772
  Synthetic oligonucleotide

SEQ ID NO: 2433 - DNA, 35 bp, Artificial Sequence
  Synthetic oligonucleotide
gtcgaaagcggagcgactctccgcacaaccccaag

SEQ ID NO: 2434 - DNA, 36 bp, Artificial Sequence; identical to SEQ ID NO: 1602
  Synthetic oligonucleotide

SEQ ID NO: 2435 - DNA, 36 bp, Artificial Sequence; identical to SEQ ID NO: 1603
  Synthetic oligonucleotide

SEQ ID NO: 2436 - DNA, 35 bp, Artificial Sequence
  Synthetic oligonucleotide
gttcagattttgctttgtgacctggtgtggggtct

SEQ ID NO: 2437 - DNA, 37 bp, Artificial Sequence; identical to SEQ ID NO: 2178
  Synthetic oligonucleotide

SEQ ID NO: 2438 - DNA, 36 bp, Artificial Sequence; identical to SEQ ID NO: 2048
  Synthetic oligonucleotide

SEQ ID NO: 2439 - DNA, 35 bp, Artificial Sequence; identical to SEQ ID NO: 1607
  Synthetic oligonucleotide

SEQ ID NO: 2440 - DNA, 36 bp, Artificial Sequence
  Synthetic oligonucleotide
tactctagtcagaggatctcttgcgatcaatatgga

SEQ ID NO: 2441 - DNA, 35 bp, Artificial Sequence
  Synthetic oligonucleotide
tactgtccttttcaattcttgtcttggttttatta

SEQ ID NO: 2442 - DNA, 35 bp, Artificial Sequence
  Synthetic oligonucleotide
tactcggccctactacacgaactcttttcaaatca

SEQ ID NO: 2443 - DNA, 35 bp, Artificial Sequence; identical to SEQ ID NO: 2186
  Synthetic oligonucleotide

SEQ ID NO: 2444 - DNA, 38 bp, Artificial Sequence
  Synthetic oligonucleotide
tattgtagcctgtacggcggctgcacctcgtacgttga

SEQ ID NO: 2445 - DNA, 35 bp, Artificial Sequence
  Synthetic oligonucleotide
tcactttgcccttttgtttcttcattaattccttc

SEQ ID NO: 2446 - DNA, 38 bp, Artificial Sequence
  Synthetic oligonucleotide
tcacgctcccggggttctatctatttcgttattcttga

SEQ ID NO: 2447 - DNA, 36 bp, Artificial Sequence; identical to SEQ ID NO: 1638
  Synthetic oligonucleotide

SEQ ID NO: 2448 - DNA, 36 bp, Artificial Sequence; identical to SEQ ID NO: 2038
  Synthetic oligonucleotide

SEQ ID NO: 2449 - DNA, 38 bp, Artificial Sequence; identical to SEQ ID NO: 1608
  Synthetic oligonucleotide

SEQ ID NO: 2450 - DNA, 35 bp, Artificial Sequence
  Synthetic oligonucleotide
tccatcatattcattattccatgcctacccatccc

SEQ ID NO: 2451 - DNA, 37 bp, Artificial Sequence; identical to SEQ ID NO: 1639
  Synthetic oligonucleotide

SEQ ID NO: 2452 - DNA, 38 bp, Artificial Sequence
  Synthetic oligonucleotide
tccccataatctccgtcctcattgcttccaaaatttga

SEQ ID NO: 2453 - DNA, 38 bp, Artificial Sequence
  Synthetic oligonucleotide
tcccctcgccactgacccatctactcgccaaatcttga

SEQ ID NO: 2454 - DNA, 38 bp, Artificial Sequence
  Synthetic oligonucleotide
tcgggcaataccctttcccatattatcttctttcctta

SEQ ID NO: 2455 - DNA, 36 bp, Artificial Sequence
  Synthetic oligonucleotide
tctcgggattttccgcgactactcgagcgctactca

SEQ ID NO: 2456 - DNA, 36 bp, Artificial Sequence
  Synthetic oligonucleotide
tcgcttccttgtacttcctattcccttttcaccaca

SEQ ID NO: 2457 - DNA, 36 bp, Artificial Sequence; identical to SEQ ID NO: 1604
  Synthetic oligonucleotide

SEQ ID NO: 2458 - DNA, 36 bp, Artificial Sequence
  Synthetic oligonucleotide
tcttcacgatatgcagtgaaaacaccacccaactta

SEQ ID NO: 2459 - DNA, 37 bp, Artificial Sequence
  Synthetic oligonucleotide
tctgcttgatggtgctttcagtttcttacttctacga

SEQ ID NO: 2460 - DNA, 35 bp, Artificial Sequence
  Synthetic oligonucleotide
tcttctgtaaccattttgttccggtttttttattt

SEQ ID NO: 2461 - DNA, 36 bp, Artificial Sequence
  Synthetic oligonucleotide
tgaagctccgaaggggtgcacttgccgacagtagta

SEQ ID NO: 2462 - DNA, 35 bp, Artificial Sequence
  Synthetic oligonucleotide
tgacgtctcctgttcggttaaccctgtgtgcctgt

SEQ ID NO: 2463 - DNA, 37 bp, Artificial Sequence
  Synthetic oligonucleotide
tgcccttcttcgtttactcttatccacattaccttga

SEQ ID NO: 2464 - DNA, 36 bp, Artificial Sequence; identical to SEQ ID NO: 1750
  Synthetic oligonucleotide

SEQ ID NO: 2465 - DNA, 36 bp, Artificial Sequence
  Synthetic oligonucleotide
tgacatatcgctcttacatcccctcacacaatttca

SEQ ID NO: 2466 - DNA, 35 bp, Artificial Sequence
  Synthetic oligonucleotide
tgctccgagtaccataaactaatttgaagctctac

SEQ ID NO: 2467 - DNA, 37 bp, Artificial Sequence; identical to SEQ ID NO: 2209
  Synthetic oligonucleotide

SEQ ID NO: 2468 - DNA, 36 bp, Artificial Sequence
  Synthetic oligonucleotide
tggaccggtcaaaggatggcaccggttcctctcaca

SEQ ID NO: 2469 - DNA, 38 bp, Artificial Sequence; identical to SEQ ID NO: 1609
  Synthetic oligonucleotide

SEQ ID NO: 2470 - DNA, 38 bp, Artificial Sequence
  Synthetic oligonucleotide
tgctttgtacaacgttggtgtttggcatttgctgttga

SEQ ID NO: 2471 - DNA, 38 bp, Artificial Sequence; identical to SEQ ID NO: 2218
  Synthetic oligonucleotide

SEQ ID NO: 2472 - DNA, 35 bp, Artificial Sequence
  Synthetic oligonucleotide
tgtgccactcgtgttcgaatttctgttccttatct

SEQ ID NO: 2473 - DNA, 37 bp, Artificial Sequence
  Synthetic oligonucleotide
tgttacgcccgtcctctatacaccaattacgatatga

SEQ ID NO: 2474 - DNA, 36 bp, Artificial Sequence
  Synthetic oligonucleotide
tgttaggcctttatttccattatcttaattgtttta

SEQ ID NO: 2475 - DNA, 35 bp, Artificial Sequence; identical to SEQ ID NO: 1644
  Synthetic oligonucleotide

SEQ ID NO: 2476 - DNA, 36 bp, Artificial Sequence
  Synthetic oligonucleotide
ttctgccggatacatttgattcaataactacttgta

SEQ ID NO: 2477 - DNA, 35 bp, Artificial Sequence
  Synthetic oligonucleotide
ttctgcttgcgagccgtccagttagggccgccacc

SEQ ID NO: 2478 - DNA, 38 bp, Artificial Sequence; identical to SEQ ID NO: 2341
  Synthetic oligonucleotide

SEQ ID NO: 2479 - DNA, 36 bp, Artificial Sequence
  Synthetic oligonucleotide
ttgcacgccccaatacacctaatctttatccataca

SEQ ID NO: 2480 - DNA, 38 bp, Artificial Sequence
  Synthetic oligonucleotide
ttcgttccggaccacccatttcctcaatcatatattga

SEQ ID NO: 2481 - DNA, 37 bp, Artificial Sequence
  Synthetic oligonucleotide
ttctgcgttttacgatgctcgatgtctgtgacatgga

SEQ ID NO: 2482 - DNA, 36 bp, Artificial Sequence
  Synthetic oligonucleotide
ttgctccgacctagtttactaaatttcaaccattga

SEQ ID NO: 2483 - DNA, 36 bp, Artificial Sequence
  Synthetic oligonucleotide
tttcattataccccatcgactttctctctagttcca

SEQ ID NO: 2484 - DNA, 35 bp, Artificial Sequence
  Synthetic oligonucleotide
ttgtcccaggcagtttccacgagaacgcgtacggt

SEQ ID NO: 2485 - DNA, 38 bp, Artificial Sequence
  Synthetic oligonucleotide
tttggacgtatcactccctaaccatttttttaccctga

SEQ ID NO: 2486 - DNA, 36 bp, Artificial Sequence; identical to SEQ ID NO: 1611
  Synthetic oligonucleotide

SEQ ID NO: 2487 - DNA, 35 bp, Artificial Sequence
  Synthetic oligonucleotide
tttcctgtttcttctttgtgtgtccatataatcga

SEQ ID NO: 2488 - DNA, 35 bp, Artificial Sequence; identical to SEQ ID NO: 1605
  Synthetic oligonucleotide

SEQ ID NO: 2489 - DNA, 36 bp, Artificial Sequence
  Synthetic oligonucleotide
tttaaacgtacgatattacttccgatccatacatta

SEQ ID NO: 2490 - DNA, 37 bp, Artificial Sequence; identical to SEQ ID NO: 1649
  Synthetic oligonucleotide

SEQ ID NO: 2491 - DNA, 35 bp, Artificial Sequence; identical to SEQ ID NO: 1599
  Synthetic oligonucleotide

SEQ ID NO: 2492 - DNA, 36 bp, Artificial Sequence; identical to SEQ ID NO: 1651
  Synthetic oligonucleotide

SEQ ID NO: 2493 - DNA, 36 bp, Artificial Sequence; identical to SEQ ID NO: 1652
  Synthetic oligonucleotide

SEQ ID NO: 2494 - DNA, 37 bp, Artificial Sequence; identical to SEQ ID NO: 2237
  Synthetic oligonucleotide

SEQ ID NO: 2495 - DNA, 38 bp, Artificial Sequence; identical to SEQ ID NO: 1653
  Synthetic oligonucleotide

SEQ ID NO: 2496 - DNA, 37 bp, Artificial Sequence
  Synthetic oligonucleotide
acaactatcaaataaacctgcgccctctatgaatgga

SEQ ID NO: 2497 - DNA, 36 bp, Artificial Sequence
  Synthetic oligonucleotide
gaccaatagacccggccaagactggagatgaaagta

SEQ ID NO: 2498 - DNA, 38 bp, Artificial Sequence; identical to SEQ ID NO: 1792
  Synthetic oligonucleotide

SEQ ID NO: 2499 - DNA, 36 bp, Artificial Sequence; identical to SEQ ID NO: 1661
  Synthetic oligonucleotide

SEQ ID NO: 2500 - DNA, 35 bp, Artificial Sequence
  Synthetic oligonucleotide
acggtatttgttttttcgattgatggggaagtaga

SEQ ID NO: 2501 - DNA, 38 bp, Artificial Sequence
  Synthetic oligonucleotide
ccacccgtacgaagccgcgttttctgagtgcctattga

SEQ ID NO: 2502 - DNA, 38 bp, Artificial Sequence; identical to SEQ ID NO: 1731
  Synthetic oligonucleotide

SEQ ID NO: 2503 - DNA, 35 bp, Artificial Sequence
  Synthetic oligonucleotide
ggccaatttgaatgagggttgtgaattatttaaga

SEQ ID NO: 2504 - DNA, 37 bp, Artificial Sequence
  Synthetic oligonucleotide
ggcctaaccatggggggtggtgattattatgaaggga

SEQ ID NO: 2505 - DNA, 36 bp, Artificial Sequence
  Synthetic oligonucleotide
ttcatcgcggggccgaggtaagcctaatcttccgta

SEQ ID NO: 2506 - DNA, 37 bp, Artificial Sequence
  Synthetic oligonucleotide
gtaactggtatcctaaaagaataggttcgtaccccga

SEQ ID NO: 2507 - DNA, 36 bp, Artificial Sequence; identical to SEQ ID NO: 2242
  Synthetic oligonucleotide

SEQ ID NO: 2508 - DNA, 36 bp, Artificial Sequence; identical to SEQ ID NO: 2243
  Synthetic oligonucleotide

SEQ ID NO: 2509 - DNA, 35 bp, Artificial Sequence; identical to SEQ ID NO: 2244
  Synthetic oligonucleotide

SEQ ID NO: 2510 - DNA, 35 bp, Artificial Sequence; identical to SEQ ID NO: 2245
  Synthetic oligonucleotide

SEQ ID NO: 2511 - DNA, 38 bp, Artificial Sequence; identical to SEQ ID NO: 2246
  Synthetic oligonucleotide

SEQ ID NO: 2512 - DNA, 35 bp, Artificial Sequence; identical to SEQ ID NO: 2247
  Synthetic oligonucleotide

SEQ ID NO: 2513 - DNA, 38 bp, Artificial Sequence; identical to SEQ ID NO: 2248
  Synthetic oligonucleotide

SEQ ID NO: 2514 - DNA, 37 bp, Artificial Sequence; identical to SEQ ID NO: 2249
  Synthetic oligonucleotide

SEQ ID NO: 2515 - DNA, 35 bp, Artificial Sequence; identical to SEQ ID NO: 2250
  Synthetic oligonucleotide

SEQ ID NO: 2516 - DNA, 37 bp, Artificial Sequence; identical to SEQ ID NO: 2251
  Synthetic oligonucleotide

SEQ ID NO: 2517 - DNA, 35 bp, Artificial Sequence; identical to SEQ ID NO: 2252
  Synthetic oligonucleotide

SEQ ID NO: 2518 - DNA, 36 bp, Artificial Sequence; identical to SEQ ID NO: 2253
  Synthetic oligonucleotide

SEQ ID NO: 2519 - DNA, 36 bp, Artificial Sequence; identical to SEQ ID NO: 2254
  Synthetic oligonucleotide

SEQ ID NO: 2520 - DNA, 35 bp, Artificial Sequence; identical to SEQ ID NO: 2255
  Synthetic oligonucleotide

SEQ ID NO: 2521 - DNA, 36 bp, Artificial Sequence; identical to SEQ ID NO: 2256
  Synthetic oligonucleotide

SEQ ID NO: 2522 - DNA, 35 bp, Artificial Sequence; identical to SEQ ID NO: 2257
  Synthetic oligonucleotide

SEQ ID NO: 2523 - DNA, 37 bp, Artificial Sequence; identical to SEQ ID NO: 2258
  Synthetic oligonucleotide

SEQ ID NO: 2524 - DNA, 36 bp, Artificial Sequence; identical to SEQ ID NO: 2259
  Synthetic oligonucleotide

SEQ ID NO: 2525 - DNA, 38 bp, Artificial Sequence; identical to SEQ ID NO: 2260
  Synthetic oligonucleotide

SEQ ID NO: 2526 - DNA, 35 bp, Artificial Sequence; identical to SEQ ID NO: 2261
  Synthetic oligonucleotide

SEQ ID NO: 2527 - DNA, 35 bp, Artificial Sequence; identical to SEQ ID NO: 2262
  Synthetic oligonucleotide

SEQ ID NO: 2528 - DNA, 36 bp, Artificial Sequence; identical to SEQ ID NO: 2263
  Synthetic oligonucleotide

SEQ ID NO: 2529 - DNA, 37 bp, Artificial Sequence; identical to SEQ ID NO: 2264
  Synthetic oligonucleotide

SEQ ID NO: 2530 - DNA, 35 bp, Artificial Sequence; identical to SEQ ID NO: 2265
  Synthetic oligonucleotide

SEQ ID NO: 2531 - DNA, 37 bp, Artificial Sequence; identical to SEQ ID NO: 2266
  Synthetic oligonucleotide

SEQ ID NO: 2532 - DNA, 35 bp, Artificial Sequence; identical to SEQ ID NO: 1892
  Synthetic oligonucleotide

SEQ ID NO: 2533 - DNA, 35 bp, Artificial Sequence; identical to SEQ ID NO: 2268
  Synthetic oligonucleotide

SEQ ID NO: 2534 - DNA, 35 bp, Artificial Sequence; identical to SEQ ID NO: 2269
  Synthetic oligonucleotide

SEQ ID NO: 2535 - DNA, 35 bp, Artificial Sequence; identical to SEQ ID NO: 2270
  Synthetic oligonucleotide

SEQ ID NO: 2536 - DNA, 36 bp, Artificial Sequence; identical to SEQ ID NO: 2271
  Synthetic oligonucleotide

SEQ ID NO: 2537 - DNA, 38 bp, Artificial Sequence; identical to SEQ ID NO: 2272
  Synthetic oligonucleotide

SEQ ID NO: 2538 - DNA, 36 bp, Artificial Sequence; identical to SEQ ID NO: 1651
  Synthetic oligonucleotide

SEQ ID NO: 2539 - DNA, 37 bp, Artificial Sequence; identical to SEQ ID NO: 2274
  Synthetic oligonucleotide

SEQ ID NO: 2540 - DNA, 37 bp, Artificial Sequence; identical to SEQ ID NO: 2275
  Synthetic oligonucleotide

SEQ ID NO: 2541 - DNA, 38 bp, Artificial Sequence; identical to SEQ ID NO: 2276
  Synthetic oligonucleotide

SEQ ID NO: 2542 - DNA, 35 bp, Artificial Sequence; identical to SEQ ID NO: 2277
  Synthetic oligonucleotide

SEQ ID NO: 2543 - DNA, 37 bp, Artificial Sequence; identical to SEQ ID NO: 2278
  Synthetic oligonucleotide

SEQ ID NO: 2544 - DNA, 35 bp, Artificial Sequence; identical to SEQ ID NO: 2279
  Synthetic oligonucleotide

SEQ ID NO: 2545 - DNA, 35 bp, Artificial Sequence; identical to SEQ ID NO: 1918
  Synthetic oligonucleotide

SEQ ID NO: 2546 - DNA, 37 bp, Artificial Sequence; identical to SEQ ID NO: 2281
  Synthetic oligonucleotide

SEQ ID NO: 2547 - DNA, 36 bp, Artificial Sequence; identical to SEQ ID NO: 2282
  Synthetic oligonucleotide

SEQ ID NO: 2548 - DNA, 35 bp, Artificial Sequence; identical to SEQ ID NO: 2283
  Synthetic oligonucleotide

SEQ ID NO: 2549 - DNA, 36 bp, Artificial Sequence; identical to SEQ ID NO: 2284
  Synthetic oligonucleotide

SEQ ID NO: 2550 - DNA, 38 bp, Artificial Sequence; identical to SEQ ID NO: 2285
  Synthetic oligonucleotide

SEQ ID NO: 2551 - DNA, 37 bp, Artificial Sequence; identical to SEQ ID NO: 2286
  Synthetic oligonucleotide

SEQ ID NO: 2552 - DNA, 37 bp, Artificial Sequence; identical to SEQ ID NO: 2287
  Synthetic oligonucleotide

SEQ ID NO: 2553 - DNA, 35 bp, Artificial Sequence; identical to SEQ ID NO: 2288
  Synthetic oligonucleotide

SEQ ID NO: 2554 - DNA, 37 bp, Artificial Sequence; identical to SEQ ID NO: 2289
  Synthetic oligonucleotide

SEQ ID NO: 2555 - DNA, 37 bp, Artificial Sequence; identical to SEQ ID NO: 1939
  Synthetic oligonucleotide

SEQ ID NO: 2556 - DNA, 37 bp, Artificial Sequence; identical to SEQ ID NO: 2291
  Synthetic oligonucleotide

SEQ ID NO: 2557 - DNA, 37 bp, Artificial Sequence; identical to SEQ ID NO: 2292
  Synthetic oligonucleotide

SEQ ID NO: 2558 - DNA, 37 bp, Artificial Sequence; identical to SEQ ID NO: 2293
  Synthetic oligonucleotide

SEQ ID NO: 2559 - DNA, 35 bp, Artificial Sequence; identical to SEQ ID NO: 2294
  Synthetic oligonucleotide

SEQ ID NO: 2560 - DNA, 38 bp, Artificial Sequence; identical to SEQ ID NO: 2295
  Synthetic oligonucleotide

SEQ ID NO: 2561 - DNA, 36 bp, Artificial Sequence; identical to SEQ ID NO: 2296
  Synthetic oligonucleotide

SEQ ID NO: 2562 - DNA, 36 bp, Artificial Sequence; identical to SEQ ID NO: 1719
  Synthetic oligonucleotide

SEQ ID NO: 2563 - DNA, 36 bp, Artificial Sequence; identical to SEQ ID NO: 2298
  Synthetic oligonucleotide

SEQ ID NO: 2564 - DNA, 37 bp, Artificial Sequence; identical to SEQ ID NO: 2299
  Synthetic oligonucleotide

SEQ ID NO: 2565 - DNA, 38 bp, Artificial Sequence; identical to SEQ ID NO: 2300
  Synthetic oligonucleotide

SEQ ID NO: 2566 - DNA, 35 bp, Artificial Sequence; identical to SEQ ID NO: 2301
  Synthetic oligonucleotide

SEQ ID NO: 2567 - DNA, 35 bp, Artificial Sequence; identical to SEQ ID NO: 2302
  Synthetic oligonucleotide

SEQ ID NO: 2568 - DNA, 36 bp, Artificial Sequence; identical to SEQ ID NO: 2303
  Synthetic oligonucleotide

SEQ ID NO: 2569 - DNA, 38 bp, Artificial Sequence; identical to SEQ ID NO: 2304
  Synthetic oligonucleotide

SEQ ID NO: 2570 - DNA, 36 bp, Artificial Sequence; identical to SEQ ID NO: 2305
  Synthetic oligonucleotide

SEQ ID NO: 2571 - DNA, 38 bp, Artificial Sequence; identical to SEQ ID NO: 2306
  Synthetic oligonucleotide

SEQ ID NO: 2572 - DNA, 36 bp, Artificial Sequence; identical to SEQ ID NO: 2307
  Synthetic oligonucleotide

SEQ ID NO: 2573 - DNA, 35 bp, Artificial Sequence; identical to SEQ ID NO: 2308
  Synthetic oligonucleotide

SEQ ID NO: 2574 - DNA, 38 bp, Artificial Sequence; identical to SEQ ID NO: 2309
  Synthetic oligonucleotide

SEQ ID NO: 2575 - DNA, 36 bp, Artificial Sequence; identical to SEQ ID NO: 2310
  Synthetic oligonucleotide

SEQ ID NO: 2576 - DNA, 38 bp, Artificial Sequence; identical to SEQ ID NO: 2311
  Synthetic oligonucleotide

SEQ ID NO: 2577 - DNA, 35 bp, Artificial Sequence; identical to SEQ ID NO: 2312
  Synthetic oligonucleotide

SEQ ID NO: 2578 - DNA, 36 bp, Artificial Sequence; identical to SEQ ID NO: 2313
  Synthetic oligonucleotide

SEQ ID NO: 2579 - DNA, 38 bp, Artificial Sequence; identical to SEQ ID NO: 2314
  Synthetic oligonucleotide

SEQ ID NO: 2580 - DNA, 35 bp, Artificial Sequence; identical to SEQ ID NO: 2315
  Synthetic oligonucleotide

SEQ ID NO: 2581 - DNA, 35 bp, Artificial Sequence; identical to SEQ ID NO: 2316
  Synthetic oligonucleotide

SEQ ID NO: 2582 - DNA, 38 bp, Artificial Sequence; identical to SEQ ID NO: 2317
  Synthetic oligonucleotide

SEQ ID NO: 2583 - DNA, 38 bp, Artificial Sequence; identical to SEQ ID NO: 2318
  Synthetic oligonucleotide

SEQ ID NO: 2584 - DNA, 38 bp, Artificial Sequence
  Synthetic oligonucleotide
atctatcgcctatcgctacaacccgtattcgcttctta

SEQ ID NO: 2585 - DNA, 38 bp, Artificial Sequence; identical to SEQ ID NO: 1543
  Synthetic oligonucleotide

SEQ ID NO: 2586 - DNA, 38 bp, Artificial Sequence; identical to SEQ ID NO: 1816
  Synthetic oligonucleotide

SEQ ID NO: 2587 - DNA, 38 bp, Artificial Sequence
  Synthetic oligonucleotide
attctctttattttatcgctttcatccagtgcatatga

SEQ ID NO: 2588 - DNA, 38 bp, Artificial Sequence; identical to SEQ ID NO: 1817
  Synthetic oligonucleotide

SEQ ID NO: 2589 - DNA, 35 bp, Artificial Sequence
  Synthetic oligonucleotide
ggcttcttatttgcttgaatatccgcttcctctct

SEQ ID NO: 2590 - DNA, 35 bp, Artificial Sequence; identical to SEQ ID NO: 1550
  Synthetic oligonucleotide

SEQ ID NO: 2591 - DNA, 35 bp, Artificial Sequence; identical to SEQ ID NO: 1551
  Synthetic oligonucleotide

SEQ ID NO: 2592 - DNA, 38 bp, Artificial Sequence; identical to SEQ ID NO: 1804
  Synthetic oligonucleotide

SEQ ID NO: 2593 - DNA, 37 bp, Artificial Sequence; identical to SEQ ID NO: 1820
  Synthetic oligonucleotide

SEQ ID NO: 2594 - DNA, 35 bp, Artificial Sequence; identical to SEQ ID NO: 2357
  Synthetic oligonucleotide

SEQ ID NO: 2595 - DNA, 37 bp, Artificial Sequence; identical to SEQ ID NO: 2055
  Synthetic oligonucleotide

SEQ ID NO: 2596 - DNA, 37 bp, Artificial Sequence; identical to SEQ ID NO: 2359
  Synthetic oligonucleotide

SEQ ID NO: 2597 - DNA, 36 bp, Artificial Sequence; identical to SEQ ID NO: 2360
  Synthetic oligonucleotide

SEQ ID NO: 2598 - DNA, 38 bp, Artificial Sequence; identical to SEQ ID NO: 2361
  Synthetic oligonucleotide

SEQ ID NO: 2599 - DNA, 36 bp, Artificial Sequence; identical to SEQ ID NO: 2362
  Synthetic oligonucleotide

SEQ ID NO: 2600 - DNA, 37 bp, Artificial Sequence; identical to SEQ ID NO: 2363
  Synthetic oligonucleotide

SEQ ID NO: 2601 - DNA, 38 bp, Artificial Sequence; identical to SEQ ID NO: 2364
  Synthetic oligonucleotide

SEQ ID NO: 2602 - DNA, 36 bp, Artificial Sequence; identical to SEQ ID NO: 2365
  Synthetic oligonucleotide

SEQ ID NO: 2603 - DNA, 37 bp, Artificial Sequence; identical to SEQ ID NO: 2366
  Synthetic oligonucleotide

SEQ ID NO: 2604 - DNA, 35 bp, Artificial Sequence; identical to SEQ ID NO: 2061
  Synthetic oligonucleotide

SEQ ID NO: 2605 - DNA, 38 bp, Artificial Sequence; identical to SEQ ID NO: 2024
  Synthetic oligonucleotide

SEQ ID NO: 2606 - DNA, 36 bp, Artificial Sequence; identical to SEQ ID NO: 2369
  Synthetic oligonucleotide

SEQ ID NO: 2607 - DNA, 35 bp, Artificial Sequence; identical to SEQ ID NO: 2330
  Synthetic oligonucleotide

SEQ ID NO: 2608 - DNA, 37 bp, Artificial Sequence; identical to SEQ ID NO: 2067
  Synthetic oligonucleotide

SEQ ID NO: 2609 - DNA, 35 bp, Artificial Sequence; identical to SEQ ID NO: 2372
  Synthetic oligonucleotide

SEQ ID NO: 2610 - DNA, 35 bp, Artificial Sequence; identical to SEQ ID NO: 2373
  Synthetic oligonucleotide

SEQ ID NO: 2611 - DNA, 36 bp, Artificial Sequence; identical to SEQ ID NO: 2374
  Synthetic oligonucleotide

SEQ ID NO: 2612 - DNA, 38 bp, Artificial Sequence; identical to SEQ ID NO: 2071
  Synthetic oligonucleotide

SEQ ID NO: 2613 - DNA, 35 bp, Artificial Sequence; identical to SEQ ID NO: 1597
  Synthetic oligonucleotide

SEQ ID NO: 2614 - DNA, 36 bp, Artificial Sequence; identical to SEQ ID NO: 1617
  Synthetic oligonucleotide

SEQ ID NO: 2615 - DNA, 36 bp, Artificial Sequence; identical to SEQ ID NO: 2378
  Synthetic oligonucleotide

SEQ ID NO: 2616 - DNA, 35 bp, Artificial Sequence; identical to SEQ ID NO: 1591
  Synthetic oligonucleotide

SEQ ID NO: 2617 - DNA, 36 bp, Artificial Sequence; identical to SEQ ID NO: 1590
  Synthetic oligonucleotide

SEQ ID NO: 2618 - DNA, 38 bp, Artificial Sequence; identical to SEQ ID NO: 2023
  Synthetic oligonucleotide

SEQ ID NO: 2619 - DNA, 36 bp, Artificial Sequence; identical to SEQ ID NO: 1586
  Synthetic oligonucleotide

SEQ ID NO: 2620 - DNA, 35 bp, Artificial Sequence; identical to SEQ ID NO: 1620
  Synthetic oligonucleotide

SEQ ID NO: 2621 - DNA, 35 bp, Artificial Sequence; identical to SEQ ID NO: 2384
  Synthetic oligonucleotide

SEQ ID NO: 2622 - DNA, 35 bp, Artificial Sequence; identical to SEQ ID NO: 1594
  Synthetic oligonucleotide

SEQ ID NO: 2623 - DNA, 37 bp, Artificial Sequence; identical to SEQ ID NO: 2386
  Synthetic oligonucleotide

SEQ ID NO: 2624 - DNA, 36 bp, Artificial Sequence; identical to SEQ ID NO: 2092
  Synthetic oligonucleotide

SEQ ID NO: 2625 - DNA, 35 bp, Artificial Sequence; identical to SEQ ID NO: 2388
  Synthetic oligonucleotide

SEQ ID NO: 2626 - DNA, 35 bp, Artificial Sequence; identical to SEQ ID NO: 2389
  Synthetic oligonucleotide

SEQ ID NO: 2627 - DNA, 36 bp, Artificial Sequence; identical to SEQ ID NO: 2390
  Synthetic oligonucleotide

SEQ ID NO: 2628 - DNA, 35 bp, Artificial Sequence; identical to SEQ ID NO: 1740
  Synthetic oligonucleotide

SEQ ID NO: 2629 - DNA, 37 bp, Artificial Sequence; identical to SEQ ID NO: 2094
  Synthetic oligonucleotide

SEQ ID NO: 2630 - DNA, 36 bp, Artificial Sequence; identical to SEQ ID NO: 2098
  Synthetic oligonucleotide

SEQ ID NO: 2631 - DNA, 37 bp, Artificial Sequence; identical to SEQ ID NO: 1587
  Synthetic oligonucleotide

SEQ ID NO: 2632 - DNA, 38 bp, Artificial Sequence; identical to SEQ ID NO: 2100
  Synthetic oligonucleotide

SEQ ID NO: 2633 - DNA, 35 bp, Artificial Sequence; identical to SEQ ID NO: 2396
  Synthetic oligonucleotide

SEQ ID NO: 2634 - DNA, 38 bp, Artificial Sequence; identical to SEQ ID NO: 2397
  Synthetic oligonucleotide

SEQ ID NO: 2635 - DNA, 38 bp, Artificial Sequence; identical to SEQ ID NO: 2398
  Synthetic oligonucleotide

SEQ ID NO: 2636 - DNA, 37 bp, Artificial Sequence; identical to SEQ ID NO: 2399
  Synthetic oligonucleotide

SEQ ID NO: 2637 - DNA, 37 bp, Artificial Sequence; identical to SEQ ID NO: 2400
  Synthetic oligonucleotide

SEQ ID NO: 2638 - DNA, 37 bp, Artificial Sequence; identical to SEQ ID NO: 2401
  Synthetic oligonucleotide

SEQ ID NO: 2639 - DNA, 38 bp, Artificial Sequence; identical to SEQ ID NO: 1596
  Synthetic oligonucleotide

SEQ ID NO: 2640 - DNA, 35 bp, Artificial Sequence; identical to SEQ ID NO: 2403
  Synthetic oligonucleotide

SEQ ID NO: 2641 - DNA, 35 bp, Artificial Sequence; identical to SEQ ID NO: 2114
  Synthetic oligonucleotide

SEQ ID NO: 2642 - DNA, 37 bp, Artificial Sequence; identical to SEQ ID NO: 2405
  Synthetic oligonucleotide

SEQ ID NO: 2643 - DNA, 35 bp, Artificial Sequence; identical to SEQ ID NO: 2120
  Synthetic oligonucleotide

SEQ ID NO: 2644 - DNA, 37 bp, Artificial Sequence; identical to SEQ ID NO: 2407
  Synthetic oligonucleotide

SEQ ID NO: 2645 - DNA, 37 bp, Artificial Sequence; identical to SEQ ID NO: 2408
  Synthetic oligonucleotide

SEQ ID NO: 2646 - DNA, 37 bp, Artificial Sequence; identical to SEQ ID NO: 2409
  Synthetic oligonucleotide

SEQ ID NO: 2647 - DNA, 35 bp, Artificial Sequence; identical to SEQ ID NO: 2410
  Synthetic oligonucleotide

SEQ ID NO: 2648 - DNA, 37 bp, Artificial Sequence; identical to SEQ ID NO: 1595
  Synthetic oligonucleotide

SEQ ID NO: 2649 - DNA, 35 bp, Artificial Sequence; identical to SEQ ID NO: 2412
  Synthetic oligonucleotide

SEQ ID NO: 2650 - DNA, 35 bp, Artificial Sequence; identical to SEQ ID NO: 2413
  Synthetic oligonucleotide

SEQ ID NO: 2651 - DNA, 37 bp, Artificial Sequence; identical to SEQ ID NO: 2414
  Synthetic oligonucleotide

SEQ ID NO: 2652 - DNA, 35 bp, Artificial Sequence; identical to SEQ ID NO: 2140
  Synthetic oligonucleotide

SEQ ID NO: 2653 - DNA, 35 bp, Artificial Sequence; identical to SEQ ID NO: 2014
  Synthetic oligonucleotide

SEQ ID NO: 2654 - DNA, 35 bp, Artificial Sequence; identical to SEQ ID NO: 1600
  Synthetic oligonucleotide

SEQ ID NO: 2655 - DNA, 36 bp, Artificial Sequence; identical to SEQ ID NO: 2143
  Synthetic oligonucleotide

SEQ ID NO: 2656 - DNA, 36 bp, Artificial Sequence; identical to SEQ ID NO: 2147
  Synthetic oligonucleotide

SEQ ID NO: 2657 - DNA, 36 bp, Artificial Sequence; identical to SEQ ID NO: 2151
  Synthetic oligonucleotide

SEQ ID NO: 2658 - DNA, 37 bp, Artificial Sequence; identical to SEQ ID NO: 2421
  Synthetic oligonucleotide

SEQ ID NO: 2659 - DNA, 36 bp, Artificial Sequence; identical to SEQ ID NO: 2422
  Synthetic oligonucleotide

SEQ ID NO: 2660 - DNA, 38 bp, Artificial Sequence; identical to SEQ ID NO: 2423
  Synthetic oligonucleotide

SEQ ID NO: 2661 - DNA, 38 bp, Artificial Sequence; identical to SEQ ID NO: 2424
  Synthetic oligonucleotide

SEQ ID NO: 2662 - DNA, 35 bp, Artificial Sequence; identical to SEQ ID NO: 2425
  Synthetic oligonucleotide

SEQ ID NO: 2663 - DNA, 38 bp, Artificial Sequence; identical to SEQ ID NO: 2426
  Synthetic oligonucleotide

SEQ ID NO: 2664 - DNA, 38 bp, Artificial Sequence; identical to SEQ ID NO: 1601
  Synthetic oligonucleotide

SEQ ID NO: 2665 - DNA, 36 bp, Artificial Sequence; identical to SEQ ID NO: 2428
  Synthetic oligonucleotide

SEQ ID NO: 2666 - DNA, 35 bp, Artificial Sequence; identical to SEQ ID NO: 1606
  Synthetic oligonucleotide

SEQ ID NO: 2667 - DNA, 37 bp, Artificial Sequence; identical to SEQ ID NO: 2166
  Synthetic oligonucleotide

SEQ ID NO: 2668 - DNA, 36 bp, Artificial Sequence; identical to SEQ ID NO: 1598
  Synthetic oligonucleotide

SEQ ID NO: 2669 - DNA, 38 bp, Artificial Sequence; identical to SEQ ID NO: 1772
  Synthetic oligonucleotide

SEQ ID NO: 2670 - DNA, 35 bp, Artificial Sequence; identical to SEQ ID NO: 2433
  Synthetic oligonucleotide

SEQ ID NO: 2671 - DNA, 36 bp, Artificial Sequence; identical to SEQ ID NO: 1602
  Synthetic oligonucleotide

SEQ ID NO: 2672 - DNA, 36 bp, Artificial Sequence; identical to SEQ ID NO: 1603
  Synthetic oligonucleotide

SEQ ID NO: 2673 - DNA, 35 bp, Artificial Sequence; identical to SEQ ID NO: 2436
  Synthetic oligonucleotide

SEQ ID NO: 2674 - DNA, 37 bp, Artificial Sequence; identical to SEQ ID NO: 2178
  Synthetic oligonucleotide

SEQ ID NO: 2675 - DNA, 36 bp, Artificial Sequence; identical to SEQ ID NO: 2048
  Synthetic oligonucleotide

SEQ ID NO: 2676 - DNA, 35 bp, Artificial Sequence; identical to SEQ ID NO: 1607
  Synthetic oligonucleotide

SEQ ID NO: 2677 - DNA, 36 bp, Artificial Sequence; identical to SEQ ID NO: 2440
  Synthetic oligonucleotide

SEQ ID NO: 2678 - DNA, 35 bp, Artificial Sequence; identical to SEQ ID NO: 2441
  Synthetic oligonucleotide

SEQ ID NO: 2679 - DNA, 35 bp, Artificial Sequence; identical to SEQ ID NO: 2442
  Synthetic oligonucleotide

SEQ ID NO: 2680 - DNA, 35 bp, Artificial Sequence; identical to SEQ ID NO: 2186
  Synthetic oligonucleotide

SEQ ID NO: 2681 - DNA, 38 bp, Artificial Sequence; identical to SEQ ID NO: 2444
  Synthetic oligonucleotide

SEQ ID NO: 2682 - DNA, 35 bp, Artificial Sequence; identical to SEQ ID NO: 2445
  Synthetic oligonucleotide

SEQ ID NO: 2683 - DNA, 38 bp, Artificial Sequence; identical to SEQ ID NO: 2446
  Synthetic oligonucleotide

SEQ ID NO: 2684 - DNA, 36 bp, Artificial Sequence; identical to SEQ ID NO: 1638
  Synthetic oligonucleotide

SEQ ID NO: 2685 - DNA, 36 bp, Artificial Sequence; identical to SEQ ID NO: 2038
  Synthetic oligonucleotide

SEQ ID NO: 2686 - DNA, 38 bp, Artificial Sequence; identical to SEQ ID NO: 1608
  Synthetic oligonucleotide

SEQ ID NO: 2687 - DNA, 35 bp, Artificial Sequence; identical to SEQ ID NO: 2450
  Synthetic oligonucleotide

SEQ ID NO: 2688 - DNA, 37 bp, Artificial Sequence; identical to SEQ ID NO: 1639
  Synthetic oligonucleotide

SEQ ID NO: 2689 - DNA, 38 bp, Artificial Sequence; identical to SEQ ID NO: 2452
  Synthetic oligonucleotide

SEQ ID NO: 2690 - DNA, 38 bp, Artificial Sequence; identical to SEQ ID NO: 2453
  Synthetic oligonucleotide

SEQ ID NO: 2691 - DNA, 38 bp, Artificial Sequence; identical to SEQ ID NO: 2454
  Synthetic oligonucleotide

SEQ ID NO: 2692 - DNA, 36 bp, Artificial Sequence; identical to SEQ ID NO: 2455
  Synthetic oligonucleotide

SEQ ID NO: 2693 - DNA, 36 bp, Artificial Sequence; identical to SEQ ID NO: 2456
  Synthetic oligonucleotide

SEQ ID NO: 2694 - DNA, 36 bp, Artificial Sequence; identical to SEQ ID NO: 1604
  Synthetic oligonucleotide

SEQ ID NO: 2695 - DNA, 36 bp, Artificial Sequence; identical to SEQ ID NO: 2458
  Synthetic oligonucleotide

SEQ ID NO: 2696 - DNA, 37 bp, Artificial Sequence; identical to SEQ ID NO: 2459
  Synthetic oligonucleotide

SEQ ID NO: 2697 - DNA, 35 bp, Artificial Sequence; identical to SEQ ID NO: 2460
  Synthetic oligonucleotide

SEQ ID NO: 2698 - DNA, 36 bp, Artificial Sequence; identical to SEQ ID NO: 2461
  Synthetic oligonucleotide

SEQ ID NO: 2699 - DNA, 35 bp, Artificial Sequence; identical to SEQ ID NO: 2462
  Synthetic oligonucleotide

SEQ ID NO: 2700 - DNA, 37 bp, Artificial Sequence; identical to SEQ ID NO: 2463
  Synthetic oligonucleotide

SEQ ID NO: 2701 - DNA, 36 bp, Artificial Sequence; identical to SEQ ID NO: 1750
  Synthetic oligonucleotide

SEQ ID NO: 2702 - DNA, 36 bp, Artificial Sequence; identical to SEQ ID NO: 2465
  Synthetic oligonucleotide

SEQ ID NO: 2703 - DNA, 35 bp, Artificial Sequence; identical to SEQ ID NO: 2466
  Synthetic oligonucleotide

SEQ ID NO: 2704 - DNA, 37 bp, Artificial Sequence; identical to SEQ ID NO: 2209
  Synthetic oligonucleotide

SEQ ID NO: 2705 - DNA, 36 bp, Artificial Sequence; identical to SEQ ID NO: 2468
  Synthetic oligonucleotide

SEQ ID NO: 2706 - DNA, 38 bp, Artificial Sequence; identical to SEQ ID NO: 1609
  Synthetic oligonucleotide

SEQ ID NO: 2707 - DNA, 38 bp, Artificial Sequence; identical to SEQ ID NO: 2470
  Synthetic oligonucleotide

SEQ ID NO: 2708 - DNA, 38 bp, Artificial Sequence; identical to SEQ ID NO: 2218
  Synthetic oligonucleotide

SEQ ID NO: 2709 - DNA, 35 bp, Artificial Sequence; identical to SEQ ID NO: 2472
  Synthetic oligonucleotide

SEQ ID NO: 2710 - DNA, 37 bp, Artificial Sequence; identical to SEQ ID NO: 2473
  Synthetic oligonucleotide

SEQ ID NO: 2711 - DNA, 36 bp, Artificial Sequence; identical to SEQ ID NO: 2474
  Synthetic oligonucleotide

SEQ ID NO: 2712 - DNA, 35 bp, Artificial Sequence; identical to SEQ ID NO: 1644
  Synthetic oligonucleotide

SEQ ID NO: 2713 - DNA, 36 bp, Artificial Sequence; identical to SEQ ID NO: 2476
  Synthetic oligonucleotide

SEQ ID NO: 2714 - DNA, 35 bp, Artificial Sequence; identical to SEQ ID NO: 2477
  Synthetic oligonucleotide

SEQ ID NO: 2715 - DNA, 38 bp, Artificial Sequence; identical to SEQ ID NO: 2341
  Synthetic oligonucleotide

SEQ ID NO: 2716 - DNA, 36 bp, Artificial Sequence; identical to SEQ ID NO: 2479
  Synthetic oligonucleotide

SEQ ID NO: 2717 - DNA, 38 bp, Artificial Sequence; identical to SEQ ID NO: 2480
  Synthetic oligonucleotide

SEQ ID NO: 2718 - DNA, 37 bp, Artificial Sequence; identical to SEQ ID NO: 2481
  Synthetic oligonucleotide

SEQ ID NO: 2719 - DNA, 36 bp, Artificial Sequence; identical to SEQ ID NO: 2482
  Synthetic oligonucleotide

SEQ ID NO: 2720 - DNA, 36 bp, Artificial Sequence; identical to SEQ ID NO: 2483
  Synthetic oligonucleotide

SEQ ID NO: 2721 - DNA, 35 bp, Artificial Sequence; identical to SEQ ID NO: 2484
  Synthetic oligonucleotide

SEQ ID NO: 2722 - DNA, 38 bp, Artificial Sequence; identical to SEQ ID NO: 2485
  Synthetic oligonucleotide

SEQ ID NO: 2723 - DNA, 36 bp, Artificial Sequence; identical to SEQ ID NO: 1611
  Synthetic oligonucleotide

SEQ ID NO: 2724 - DNA, 35 bp, Artificial Sequence; identical to SEQ ID NO: 2487
  Synthetic oligonucleotide

SEQ ID NO: 2725 - DNA, 35 bp, Artificial Sequence; identical to SEQ ID NO: 1605
  Synthetic oligonucleotide

SEQ ID NO: 2726 - DNA, 36 bp, Artificial Sequence; identical to SEQ ID NO: 2489
  Synthetic oligonucleotide

SEQ ID NO: 2727 - DNA, 37 bp, Artificial Sequence; identical to SEQ ID NO: 1649
  Synthetic oligonucleotide

SEQ ID NO: 2728 - DNA, 35 bp, Artificial Sequence; identical to SEQ ID NO: 1599
  Synthetic oligonucleotide

SEQ ID NO: 2729 - DNA, 36 bp, Artificial Sequence
  Synthetic oligonucleotide
aattgtgaatcacaactcctggtatataggctttga

SEQ ID NO: 2730 - DNA, 36 bp, Artificial Sequence
  Synthetic oligonucleotide
cggcatacgaacctgtctcaaatcctagtaaggtaa

SEQ ID NO: 2731 - DNA, 36 bp, Artificial Sequence
  Synthetic oligonucleotide
agttgtgaaacacaactcctggtatataggctttga

SEQ ID NO: 2732 - DNA, 36 bp, Artificial Sequence
  Synthetic oligonucleotide
gagcttgatatcatcttccacttcttcgctattcta

SEQ ID NO: 2733 - DNA, 38 bp, Artificial Sequence
  Synthetic oligonucleotide
ggtcataatgtgaatcatgaatagtactaatttactga

SEQ ID NO: 2734 - DNA, 36 bp, Artificial Sequence
  Synthetic oligonucleotide
tggcggctcacgtattctgaaagttagtggtgcgga

SEQ ID NO: 2735 - DNA, 37 bp, Artificial Sequence
  Synthetic oligonucleotide
tagctcatgggttgcatcctcaggataactccgctga

SEQ ID NO: 2736 - DNA, 35 bp, Artificial Sequence
  Synthetic oligonucleotide
tcttattttcgcaagatcttttatctaaatacaat

SEQ ID NO: 2737 - DNA, 38 bp, Artificial Sequence
  Synthetic oligonucleotide
tttcgaccattgtgggatttccggcggtccaattatga

SEQ ID NO: 2738 - DNA, 38 bp, Artificial Sequence
  Synthetic oligonucleotide
actaggaagaacaggtacgtagggacacctgacagtga

SEQ ID NO: 2739 - DNA, 37 bp, Artificial Sequence
  Synthetic oligonucleotide
gacagctatcaacgaccgacaacggaaattggtgtga

SEQ ID NO: 2740 - DNA, 37 bp, Artificial Sequence
  Synthetic oligonucleotide
gggcgtcccttgcgttctctcaacgaatgtgtcgcga

SEQ ID NO: 2741 - DNA, 38 bp, Artificial Sequence
  Synthetic oligonucleotide
tggcgggcgtgggtgttgccgagacgtcagtaccgtga

SEQ ID NO: 2742 - DNA, 37 bp, Artificial Sequence
  Synthetic oligonucleotide
tggagcggcgagttggaatcctgatgtgggctcatga

SEQ ID NO: 2743 - DNA, 38 bp, Artificial Sequence
  Synthetic oligonucleotide
atagataaatggggaggtcgcgcattgaatgatggtga

SEQ ID NO: 2744 - DNA, 38 bp, Artificial Sequence
  Synthetic oligonucleotide
gccgtatgattaagcgatctctggcatatggcatctga

SEQ ID NO: 2745 - DNA, 38 bp, Artificial Sequence
  Synthetic oligonucleotide
tctcgaagttccgtttagccccaaggtcgcgggcgtga

SEQ ID NO: 2746 - DNA, 37 bp, Artificial Sequence
  Synthetic oligonucleotide
aaccgggtgtccaaaccgtaatttaatgtttctggga

SEQ ID NO: 2747 - DNA, 37 bp, Artificial Sequence
  Synthetic oligonucleotide
aaccgggcgtccaaaccgtaatttaatgtttctggga

SEQ ID NO: 2748 - DNA, 35 bp, Artificial Sequence
  Synthetic oligonucleotide
ataattcgcgtccggtccttggaaataaacggcgt

SEQ ID NO: 2749 - DNA, 35 bp, Artificial Sequence
  Synthetic oligonucleotide
gggcggcctcgttttatcgggaaaaggaacaaagt

SEQ ID NO: 2750 - DNA, 35 bp, Artificial Sequence
  Synthetic oligonucleotide
gggcggcctcgttttatcgggaaaaggaacaatat

SEQ ID NO: 2751 - DNA, 35 bp, Artificial Sequence
  Synthetic oligonucleotide
gggcggcctcgttttatcgggaaaaggaacaatct

SEQ ID NO: 2752 - DNA, 36 bp, Artificial Sequence
  Synthetic oligonucleotide
tggctgctggacgcgtcttacagccgaccacatcaa

SEQ ID NO: 2753 - DNA, 38 bp, Artificial Sequence
  Synthetic oligonucleotide
tagccctaattgcgcttcttagcagggctcgtggttga

SEQ ID NO: 2754 - DNA, 35 bp, Artificial Sequence
  Synthetic oligonucleotide
tttaggctttagggtacgacagcaataggtacaaa

SEQ ID NO: 2755 - DNA, 38 bp, Artificial Sequence
  Synthetic oligonucleotide
atagataaatggggagagcgcgcattgaatgatggtga

SEQ ID NO: 2756 - DNA, 35 bp, Artificial Sequence
  Synthetic oligonucleotide
gagagaagtatttgttaagccacatagttttcata

SEQ ID NO: 2757 - DNA, 35 bp, Artificial Sequence
  Synthetic oligonucleotide
gagagaagtatttgttaagccacatagttttcatc

SEQ ID NO: 2758 - DNA, 36 bp, Artificial Sequence; identical to SEQ ID NO: 2732
  Synthetic oligonucleotide

SEQ ID NO: 2759 - DNA, 35 bp, Artificial Sequence
  Synthetic oligonucleotide
tcttattttagcaagatcttttatctaaataaact

SEQ ID NO: 2760 - DNA, 35 bp, Artificial Sequence
  Synthetic oligonucleotide
tcttattttagcaagatcttttatctaaatacctt

SEQ ID NO: 2761 - DNA, 35 bp, Artificial Sequence
  Synthetic oligonucleotide
tcttattttagcaagatcttttatctaaatactaa

SEQ ID NO: 2762 - DNA, 35 bp, Artificial Sequence
  Synthetic oligonucleotide
tcttattttagcaagatcttttatctaaatactag

SEQ ID NO: 2763 - DNA, 37 bp, Artificial Sequence
  Synthetic oligonucleotide
tgggaggttcagaagtctttggccttgatctgcagga

SEQ ID NO: 2764 - DNA, 36 bp, Artificial Sequence
  Synthetic oligonucleotide
accaccaaatccccaaccacttttccgcttatccca

SEQ ID NO: 2765 - DNA, 35 bp, Artificial Sequence
  Synthetic oligonucleotide
catgcagccccacaccgcttttatattgttttctc

SEQ ID NO: 2766 - DNA, 35 bp, Artificial Sequence
  Synthetic oligonucleotide
catgcataggctcactcctggaacactacctttat

SEQ ID NO: 2767 - DNA, 36 bp, Artificial Sequence
  Synthetic oligonucleotide
caacagtcatgtcaccctattatttgctttcattca

SEQ ID NO: 2768 - DNA, 36 bp, Artificial Sequence
  Synthetic oligonucleotide
catgccatatgtcccatcacttacctaccatcccta

SEQ ID NO: 2769 - DNA, 35 bp, Artificial Sequence
  Synthetic oligonucleotide
catgcgatccaatcctatagtccttggaccttata

SEQ ID NO: 2770 - DNA, 35 bp, Artificial Sequence
  Synthetic oligonucleotide
catgcgatccctcacacaactttcatcccaatacc

SEQ ID NO: 2771 - DNA, 35 bp, Artificial Sequence
  Synthetic oligonucleotide
cttgcgatattaactttccatcactttccttcttt

SEQ ID NO: 2772 - DNA, 35 bp, Artificial Sequence
  Synthetic oligonucleotide
catgcgccgatacccatttcccaattcctcttcaa

SEQ ID NO: 2773 - DNA, 35 bp, Artificial Sequence
  Synthetic oligonucleotide
cactgccacgtcaaatgcctctttcatttccattt

SEQ ID NO: 2774 - DNA, 36 bp, Artificial Sequence
  Synthetic oligonucleotide
cactgcggtcgagcctcctaattgttctcaccctta

SEQ ID NO: 2775 - DNA, 38 bp, Artificial Sequence
  Synthetic oligonucleotide
cgaacagtggtacacgacgtagtgcactctttttatga

SEQ ID NO: 2776 - DNA, 35 bp, Artificial Sequence
  Synthetic oligonucleotide
attgatctgcatgtgccattttcccacctttgttt

SEQ ID NO: 2777 - DNA, 35 bp, Artificial Sequence
  Synthetic oligonucleotide
gcacatgcgtactctcattaacttcattaccatcc

SEQ ID NO: 2778 - DNA, 35 bp, Artificial Sequence
  Synthetic oligonucleotide
gcgattacccactcttgtaaactaatttgcccatt

SEQ ID NO: 2779 - DNA, 38 bp, Artificial Sequence
  Synthetic oligonucleotide
gagacacgccactctcacgacacgttccttatttctga

SEQ ID NO: 2780 - DNA, 35 bp, Artificial Sequence; identical to SEQ ID NO: 452
  Synthetic oligonucleotide

SEQ ID NO: 2781 - DNA, 34 bp, Artificial Sequence
  Synthetic oligonucleotide
gccacaacacaattcttccgccatcactgcccaa

SEQ ID NO: 2782 - DNA, 35 bp, Artificial Sequence
  Synthetic oligonucleotide
gcctgaccacccgtataatttaccgcctaaacctt

SEQ ID NO: 2783 - DNA, 34 bp, Artificial Sequence; identical to SEQ ID NO: 161
  Synthetic oligonucleotide

SEQ ID NO: 2784 - DNA, 36 bp, Artificial Sequence
  Synthetic oligonucleotide
tacgactcatacttccattccgcctaaccttttcca

SEQ ID NO: 2785 - DNA, 35 bp, Artificial Sequence
  Synthetic oligonucleotide
gcgtatcaccatggctcacttttcctatctccttt

SEQ ID NO: 2786 - DNA, 35 bp, Artificial Sequence
  Synthetic oligonucleotide
ggccacgtaacagctactcaacgcgcaacactaac

SEQ ID NO: 2787 - DNA, 36 bp, Artificial Sequence
  Synthetic oligonucleotide
gcggccacactttgccttcttattcgttaattccta

SEQ ID NO: 2788 - DNA, 35 bp, Artificial Sequence
  Synthetic oligonucleotide
tgctgtcaacgcgaagatctttctcttttattctt

SEQ ID NO: 2789 - DNA, 35 bp, Artificial Sequence
  Synthetic oligonucleotide
tatgcggcgaacgccttctatttcctggttctctt

SEQ ID NO: 2790 - DNA, 35 bp, Artificial Sequence
  Synthetic oligonucleotide
tatgccccacgataatttcctctttttgcatattt

SEQ ID NO: 2791 - DNA, 36 bp, Artificial Sequence; identical to SEQ ID NO: 570
  Synthetic oligonucleotide

SEQ ID NO: 2792 - DNA, 36 bp, Artificial Sequence
  Synthetic oligonucleotide
acaccacgcctctgccggtggacgtactgcccatta

SEQ ID NO: 2793 - DNA, 38 bp, Artificial Sequence
  Synthetic oligonucleotide
gccacgtagaacacccatcctgatccatacaatactga

SEQ ID NO: 2794 - DNA, 35 bp, Artificial Sequence; identical to SEQ ID NO: 778
  Synthetic oligonucleotide

SEQ ID NO: 2795 - DNA, 36 bp, Artificial Sequence
  Synthetic oligonucleotide
acgcacgtgcagtcgtatcccgtttcttgcgcttta

SEQ ID NO: 2796 - DNA, 35 bp, Artificial Sequence
  Synthetic oligonucleotide
gacctagaagagggcgcttaaaattgggagtggtt

SEQ ID NO: 2797 - DNA, 35 bp, Artificial Sequence
  Synthetic oligonucleotide
atgcactacgcagatgcaaactatctttcgccttc

SEQ ID NO: 2798 - DNA, 35 bp, Artificial Sequence; identical to SEQ ID NO: 429
  Synthetic oligonucleotide

SEQ ID NO: 2799 - DNA, 38 bp, Artificial Sequence
  Synthetic oligonucleotide
gatgtagctgccacgagtgcgtatactcctttatctga

SEQ ID NO: 2800 - DNA, 36 bp, Artificial Sequence
  Synthetic oligonucleotide
gcccagctgcggtcacttgcccagccattccaccaa

SEQ ID NO: 2801 - DNA, 35 bp, Artificial Sequence; identical to SEQ ID NO: 452
  Synthetic oligonucleotide

SEQ ID NO: 2802 - DNA, 34 bp, Artificial Sequence; identical to SEQ ID NO: 161
  Synthetic oligonucleotide

SEQ ID NO: 2803 - DNA, 35 bp, Artificial Sequence
  Synthetic oligonucleotide
gccgagtcaatcaagctcggattacagtgtttacc

SEQ ID NO: 2804 - DNA, 35 bp, Artificial Sequence
  Synthetic oligonucleotide
tactgcaggtacagagtatcttcatccacctccat

SEQ ID NO: 2805 - DNA, 36 bp, Artificial Sequence
  Synthetic oligonucleotide
ggtgccgttgaggtatacggaccgtgcaggccatca

SEQ ID NO: 2806 - DNA, 36 bp, Artificial Sequence; identical to SEQ ID NO: 706
  Synthetic oligonucleotide

SEQ ID NO: 2807 - DNA, 35 bp, Artificial Sequence
  Synthetic oligonucleotide
gtcgtgcgaggtcaagtactcctattctctctaaa

SEQ ID NO: 2808 - DNA, 38 bp, Artificial Sequence
  Synthetic oligonucleotide
tggagggccgagtggtgggggtttgagaagcattatga

SEQ ID NO: 2809 - DNA, 37 bp, Artificial Sequence
  Synthetic oligonucleotide
tcacgacgtacaaaggttggcgtacttaccttactga

SEQ ID NO: 2810 - DNA, 35 bp, Artificial Sequence
  Synthetic oligonucleotide
tgcactgtaggtcatttcgtttacttgccaccatc

SEQ ID NO: 2811 - DNA, 36 bp, Artificial Sequence
  Synthetic oligonucleotide
tgtaacagcagtcgcggggaattattggctcttgaa

SEQ ID NO: 2812 - DNA, 36 bp, Artificial Sequence
  Synthetic oligonucleotide
tgtacaagtcagacgcgcccaaccctgtttacacta

SEQ ID NO: 2813 - DNA, 38 bp, Artificial Sequence
  Synthetic oligonucleotide
tgtacacctgcaatgcgtggtattactttgttccttga

SEQ ID NO: 2814 - DNA, 38 bp, Artificial Sequence
  Synthetic oligonucleotide
tccacatgccgttgaactctttattccctttaccttga

SEQ ID NO: 2815 - DNA, 35 bp, Artificial Sequence
  Synthetic oligonucleotide
ttggtacccgatagaatctagtttttgtagccaag

SEQ ID NO: 2816 - DNA, 35 bp, Artificial Sequence
  Synthetic oligonucleotide
acggacatgcgagcaacaatgaacgtctttttttc

SEQ ID NO: 2817 - DNA, 36 bp, Artificial Sequence
  Synthetic oligonucleotide
aaccacgaaggtacggacacactttacataccctta

SEQ ID NO: 2818 - DNA, 38 bp, Artificial Sequence
  Synthetic oligonucleotide
atgtacgcggtacccatcacacactatgtgtcccttga

SEQ ID NO: 2819 - DNA, 35 bp, Artificial Sequence
  Synthetic oligonucleotide
agtcacacaagcctccgattcattcttctaaacat

SEQ ID NO: 2820 - DNA, 38 bp, Artificial Sequence
  Synthetic oligonucleotide
catgcgcaggtatcttgctacactattctcccgtttga

SEQ ID NO: 2821 - DNA, 36 bp, Artificial Sequence
  Synthetic oligonucleotide
atgcgcacccgctatctacccgtgacacacgcctta

SEQ ID NO: 2822 - DNA, 35 bp, Artificial Sequence
  Synthetic oligonucleotide
atctcgaaccaccaccttccatcccttatgttgtc

SEQ ID NO: 2823 - DNA, 35 bp, Artificial Sequence
  Synthetic oligonucleotide
gcgaaccggaacttaatatccttgtaaccgctatc

SEQ ID NO: 2824 - DNA, 36 bp, Artificial Sequence
  Synthetic oligonucleotide
gcaacccgacctcgctccaaccgcttacgactccta

SEQ ID NO: 2825 - DNA, 36 bp, Artificial Sequence
  Synthetic oligonucleotide
gcaccccacatcccacgatcccatggatacccgcca

SEQ ID NO: 2826 - DNA, 36 bp, Artificial Sequence
  Synthetic oligonucleotide
gccaacctcaccaccggtacgccttatcgctaatta

SEQ ID NO: 2827 - DNA, 35 bp, Artificial Sequence
  Synthetic oligonucleotide
tcagtaccgccattcccaaaaatttttccccaaca

SEQ ID NO: 2828 - DNA, 35 bp, Artificial Sequence
  Synthetic oligonucleotide
tgaagccagctgacgtacatccacatattccctac

SEQ ID NO: 2829 - DNA, 36 bp, Artificial Sequence
  Synthetic oligonucleotide
tcaaccaactcaccctcatttactcgcataacatta

SEQ ID NO: 2830 - DNA, 35 bp, Artificial Sequence
  Synthetic oligonucleotide
tatgcccgcctgactctcttattactggttccgac

SEQ ID NO: 2831 - DNA, 36 bp, Artificial Sequence
  Synthetic oligonucleotide
actgctggcaccgcaatctacctaaagtttccgtta

SEQ ID NO: 2832 - DNA, 35 bp, Artificial Sequence
  Synthetic oligonucleotide
accacgcactcaggttcatgcatcttgaactttac

SEQ ID NO: 2833 - DNA, 36 bp, Artificial Sequence
  Synthetic oligonucleotide
gaccgtcgcaggccgtggctagcaggacgttggcta

SEQ ID NO: 2834 - DNA, 38 bp, Artificial Sequence
  Synthetic oligonucleotide
gacgaacgtgctgttggtattttttgaactcttattga

SEQ ID NO: 2835 - DNA, 37 bp, Artificial Sequence
  Synthetic oligonucleotide
gacatcctggaggtcctaactgcggtctcacacttga

SEQ ID NO: 2836 - DNA, 35 bp, Artificial Sequence
  Synthetic oligonucleotide
atgccggggtcacgacgttaccgcactccatctat

SEQ ID NO: 2837 - DNA, 35 bp, Artificial Sequence
  Synthetic oligonucleotide
atcagcaacgcccagtggtgcaagctttacccttt

SEQ ID NO: 2838 - DNA, 36 bp, Artificial Sequence
  Synthetic oligonucleotide
gactaccgtacgtgcatggcccccagttacacaata

SEQ ID NO: 2839 - DNA, 35 bp, Artificial Sequence
  Synthetic oligonucleotide
tacctcaaccgcgaactttgctacgttttgtaggg

SEQ ID NO: 2840 - DNA, 35 bp, Artificial Sequence
  Synthetic oligonucleotide
tacgctgtcgtgtgaggccctaccgctcccctatc

SEQ ID NO: 2841 - DNA, 35 bp, Artificial Sequence
  Synthetic oligonucleotide
gtcacggaagcagttacgaacgatgcccttccatc

SEQ ID NO: 2842 - DNA, 36 bp, Artificial Sequence; identical to SEQ ID NO: 2811
  Synthetic oligonucleotide

SEQ ID NO: 2843 - DNA, 35 bp, Artificial Sequence
  Synthetic oligonucleotide
ttgtgacgtctcgtgcgcattaccggttaatattt

SEQ ID NO: 2844 - DNA, 35 bp, Artificial Sequence; identical to SEQ ID NO: 2815
  Synthetic oligonucleotide

SEQ ID NO: 2845 - DNA, 35 bp, Artificial Sequence
  Synthetic oligonucleotide
tttaacgtagtgagtcaccattgatcctttaattt

SEQ ID NO: 2846 - DNA, 35 bp, Artificial Sequence
  Synthetic oligonucleotide
acccacgcctaccctaatccttgtctgttattttc

SEQ ID NO: 2847 - DNA, 36 bp, Artificial Sequence
  Synthetic oligonucleotide
catgccgaataatctctttcgttcctggtcctttta

SEQ ID NO: 2848 - DNA, 37 bp, Artificial Sequence
  Synthetic oligonucleotide
catgccgccaaaccacactgttccgtcttacttatga

SEQ ID NO: 2849 - DNA, 35 bp, Artificial Sequence
  Synthetic oligonucleotide
catgcgaacaacctttaccattcactagcacccct

SEQ ID NO: 2850 - DNA, 38 bp, Artificial Sequence
  Synthetic oligonucleotide
catgcgacacgctctatcgctttcacatcttcgcttga

SEQ ID NO: 2851 - DNA, 35 bp, Artificial Sequence; identical to SEQ ID NO: 2770
  Synthetic oligonucleotide

SEQ ID NO: 2852 - DNA, 35 bp, Artificial Sequence
  Synthetic oligonucleotide
catgcgcactttcctcacatgataccctgcatgac

SEQ ID NO: 2853 - DNA, 35 bp, Artificial Sequence
  Synthetic oligonucleotide
catgcgcatccaatcacactttttaatttcatttc

SEQ ID NO: 2854 - DNA, 35 bp, Artificial Sequence
  Synthetic oligonucleotide
atgcctagcagccaagcaatgcctttcatttattc

SEQ ID NO: 2855 - DNA, 36 bp, Artificial Sequence
  Synthetic oligonucleotide
gccgcagccatcatctacgcttcacactcatcacca

SEQ ID NO: 2856 - DNA, 36 bp, Artificial Sequence
  Synthetic oligonucleotide
ggtacgcaggcgcgatttgtacatttttgatcctga

SEQ ID NO: 2857 - DNA, 38 bp, Artificial Sequence
  Synthetic oligonucleotide
tctaacgtactatcatgtgccacgccttcatttcctga

SEQ ID NO: 2858 - DNA, 35 bp, Artificial Sequence
  Synthetic oligonucleotide
tcaactgccaccgaccccaacccgcgacccatcct

SEQ ID NO: 2859 - DNA, 36 bp, Artificial Sequence; identical to SEQ ID NO: 368
  Synthetic oligonucleotide

SEQ ID NO: 2860 - DNA, 36 bp, Artificial Sequence
  Synthetic oligonucleotide
cgcgagccagggtactgcctgcggtctaaacaataa

SEQ ID NO: 2861 - DNA, 36 bp, Artificial Sequence; identical to SEQ ID NO: 151
  Synthetic oligonucleotide

SEQ ID NO: 2862 - DNA, 35 bp, Artificial Sequence; identical to SEQ ID NO: 326
  Synthetic oligonucleotide

SEQ ID NO: 2863 - DNA, 35 bp, Artificial Sequence; identical to SEQ ID NO: 181
  Synthetic oligonucleotide

SEQ ID NO: 2864 - DNA, 38 bp, Artificial Sequence; identical to SEQ ID NO: 852
  Synthetic oligonucleotide

SEQ ID NO: 2865 - DNA, 36 bp, Artificial Sequence; identical to SEQ ID NO: 184
  Synthetic oligonucleotide

SEQ ID NO: 2866 - DNA, 36 bp, Artificial Sequence
  Synthetic oligonucleotide
tgggtgtcgtactggtaccaaggagtgcgaaatcta

SEQ ID NO: 2867 - DNA, 35 bp, Artificial Sequence; identical to SEQ ID NO: 272
  Synthetic oligonucleotide

SEQ ID NO: 2868 - DNA, 35 bp, Artificial Sequence
  Synthetic oligonucleotide
acgcgcataaaccaatcactaccgaccacttattc

SEQ ID NO: 2869 - DNA, 35 bp, Artificial Sequence
  Synthetic oligonucleotide
acgtcaggcataaattcttcaaactcttactatca

SEQ ID NO: 2870 - DNA, 36 bp, Artificial Sequence
  Synthetic oligonucleotide
catgcccggaccattattattcgcttaccattccca

SEQ ID NO: 2871 - DNA, 37 bp, Artificial Sequence
  Synthetic oligonucleotide
catgccgaccactgttccttttacctcttatacctga

SEQ ID NO: 2872 - DNA, 35 bp, Artificial Sequence
  Synthetic oligonucleotide
catgcgaacagacgaatgattcttacaaccgcaac

SEQ ID NO: 2873 - DNA, 35 bp, Artificial Sequence
  Synthetic oligonucleotide
cccgtccgcaggcatccacgtttatgccttttatc

SEQ ID NO: 2874 - DNA, 36 bp, Artificial Sequence
  Synthetic oligonucleotide
cacgcgaccctcattaacatcatctaacccaatcca

SEQ ID NO: 2875 - DNA, 35 bp, Artificial Sequence
  Synthetic oligonucleotide
catgcgccaattttactgtacatttctttttttat

SEQ ID NO: 2876 - DNA, 35 bp, Artificial Sequence
  Synthetic oligonucleotide
catgcgcgccgacctactcgcttaatctcacgttt

SEQ ID NO: 2877 - DNA, 35 bp, Artificial Sequence
  Synthetic oligonucleotide
catggcgaccctcaatctcacattttacctcttct

SEQ ID NO: 2878 - DNA, 35 bp, Artificial Sequence
  Synthetic oligonucleotide
gacggactgcgtatcgcatagtttatccttttttt

SEQ ID NO: 2879 - DNA, 35 bp, Artificial Sequence
  Synthetic oligonucleotide
gcccaccatatcgcaatcatattcctcgccttgtt

SEQ ID NO: 2880 - DNA, 35 bp, Artificial Sequence
  Synthetic oligonucleotide
gcgcatgtcaaccttacctctattggcccttattc

SEQ ID NO: 2881 - DNA, 35 bp, Artificial Sequence
  Synthetic oligonucleotide
gcatccagtccataactcaatctcacctgtaattc

SEQ ID NO: 2882 - DNA, 35 bp, Artificial Sequence
  Synthetic oligonucleotide
gccgcatacccctgtaatttcgtaacctacaccca

SEQ ID NO: 2883 - DNA, 34 bp, Artificial Sequence
  Synthetic oligonucleotide
gcgcaactccgactatcactgccttaccaatcac

SEQ ID NO: 2884 - DNA, 36 bp, Artificial Sequence
  Synthetic oligonucleotide
gcgacgcctctgacctacatataactttgatagtaa

SEQ ID NO: 2885 - DNA, 35 bp, Artificial Sequence
  Synthetic oligonucleotide
gcgacgcgtgaacacccttattctgtaatcttttt

SEQ ID NO: 2886 - DNA, 35 bp, Artificial Sequence
  Synthetic oligonucleotide
gtactgtcaacccgatctttgtttgtatttatttt

SEQ ID NO: 2887 - DNA, 38 bp, Artificial Sequence
  Synthetic oligonucleotide
gcgcggtactcattatccttatatcatcttacatttga

SEQ ID NO: 2888 - DNA, 37 bp, Artificial Sequence
  Synthetic oligonucleotide
tatgcgagcccatttttcacctttgctatttcttaga

SEQ ID NO: 2889 - DNA, 35 bp, Artificial Sequence
  Synthetic oligonucleotide
tcctccagcacattctaccacactaccacattcat

SEQ ID NO: 2890 - DNA, 35 bp, Artificial Sequence
  Synthetic oligonucleotide
tatgcggtgccacttctctattacttctattactt

SEQ ID NO: 2891 - DNA, 36 bp, Artificial Sequence
  Synthetic oligonucleotide
tcatgcagcctagtatctatcctaccatattattca

SEQ ID NO: 2892 - DNA, 35 bp, Artificial Sequence
  Synthetic oligonucleotide
tgacggacagtgcatgcgttatacttattctctat

SEQ ID NO: 2893 - DNA, 38 bp, Artificial Sequence
  Synthetic oligonucleotide
aagcctggccgtggtgctgcagtttattccgttagtga

SEQ ID NO: 2894 - DNA, 36 bp, Artificial Sequence; identical to SEQ ID NO: 2860
  Synthetic oligonucleotide

SEQ ID NO: 2895 - DNA, 36 bp, Artificial Sequence; identical to SEQ ID NO: 151
  Synthetic oligonucleotide

SEQ ID NO: 2896 - DNA, 36 bp, Artificial Sequence
  Synthetic oligonucleotide
gcattcgcgtactgtggacaacctatatccgggtaa

SEQ ID NO: 2897 - DNA, 36 bp, Artificial Sequence
  Synthetic oligonucleotide
gcaactatcgcgagcgccttcaagattagcgtgtca

SEQ ID NO: 2898 - DNA, 38 bp, Artificial Sequence; identical to SEQ ID NO: 169
  Synthetic oligonucleotide

SEQ ID NO: 2899 - DNA, 38 bp, Artificial Sequence
  Synthetic oligonucleotide
gtgcggggccacaggtgatagcaatgcatgccctatga

SEQ ID NO: 2900 - DNA, 37 bp, Artificial Sequence
  Synthetic oligonucleotide
tcaccccaagcagtcattgcctacaggagtctggtga

SEQ ID NO: 2901 - DNA, 37 bp, Artificial Sequence
  Synthetic oligonucleotide
tgcagttagtgcaatgaatatctcggacacgcggaga

SEQ ID NO: 2902 - DNA, 35 bp, Artificial Sequence
  Synthetic oligonucleotide
tccgcagacagccgggggtcaggactacggctacg

SEQ ID NO: 2903 - DNA, 37 bp, Artificial Sequence
  Synthetic oligonucleotide
ttacagctactctgcgctccaagtggacactttacga

SEQ ID NO: 2904 - DNA, 36 bp, Artificial Sequence
  Synthetic oligonucleotide
ttagcatcactgacttggatacatacagcatgtcga

SEQ ID NO: 2905 - DNA, 35 bp, Artificial Sequence
  Synthetic oligonucleotide
agcacgactgcaatccacatccgttcttattcctt

SEQ ID NO: 2906 - DNA, 37 bp, Artificial Sequence
  Synthetic oligonucleotide
aatgcgcacatctgtttttgtaccttagaatgtttga

SEQ ID NO: 2907 - DNA, 35 bp, Artificial Sequence; identical to SEQ ID NO: 2869
  Synthetic oligonucleotide

SEQ ID NO: 2908 - DNA, 36 bp, Artificial Sequence
  Synthetic oligonucleotide
catgcaccactcgcacattccaccacaatctataca

SEQ ID NO: 2909 - DNA, 35 bp, Artificial Sequence
  Synthetic oligonucleotide
ctgccactagccgcccatactatccacaccataat

SEQ ID NO: 2910 - DNA, 35 bp, Artificial Sequence
  Synthetic oligonucleotide
ccatgcgcggtcacacataccagtccttaccattt

SEQ ID NO: 2911 - DNA, 35 bp, Artificial Sequence
  Synthetic oligonucleotide
catgccgacacaccacttttttccgaccgacttcc

SEQ ID NO: 2912 - DNA, 35 bp, Artificial Sequence
  Synthetic oligonucleotide
catgccgcctttcgacttccatatcccaacacgac

SEQ ID NO: 2913 - DNA, 35 bp, Artificial Sequence; identical to SEQ ID NO: 194
  Synthetic oligonucleotide

SEQ ID NO: 2914 - DNA, 35 bp, Artificial Sequence; identical to SEQ ID NO: 195
  Synthetic oligonucleotide

SEQ ID NO: 2915 - DNA, 35 bp, Artificial Sequence
  Synthetic oligonucleotide
cttgccgatcccgctccctagttcccttgcccact

SEQ ID NO: 2916 - DNA, 36 bp, Artificial Sequence
  Synthetic oligonucleotide
cacgcatgtctgcgctcgtatcttttcaccctatga

SEQ ID NO: 2917 - DNA, 38 bp, Artificial Sequence
  Synthetic oligonucleotide
cactgcggtcaacacccaccaacctccgaccttactga

SEQ ID NO: 2918 - DNA, 38 bp, Artificial Sequence
  Synthetic oligonucleotide
catgcgtacgccactttcgcctactctaacatatctga

SEQ ID NO: 2919 - DNA, 35 bp, Artificial Sequence
  Synthetic oligonucleotide
cagtctgcgcgaccctttctgttccttcatcccca

SEQ ID NO: 2920 - DNA, 35 bp, Artificial Sequence
  Synthetic oligonucleotide
cattgcgccttctattttattttccttatatttgt

SEQ ID NO: 2921 - DNA, 38 bp, Artificial Sequence
  Synthetic oligonucleotide
cattgcggccattacccctctaccgttaccctttttga

SEQ ID NO: 2922 - DNA, 35 bp, Artificial Sequence
  Synthetic oligonucleotide
gcacacacctgcggagcaccactccaaattaccca

SEQ ID NO: 2923 - DNA, 35 bp, Artificial Sequence
  Synthetic oligonucleotide
gcacactacgtttaccctggcccttctaattgttt

SEQ ID NO: 2924 - DNA, 35 bp, Artificial Sequence
  Synthetic oligonucleotide
gcactgccattgatttcttcccacttcacactctt

SEQ ID NO: 2925 - DNA, 36 bp, Artificial Sequence
  Synthetic oligonucleotide
gcgaacactgatcttaactaacgcccgcccaattta

SEQ ID NO: 2926 - DNA, 36 bp, Artificial Sequence
  Synthetic oligonucleotide
gcacccccaatgaccgccatcaaaccatatattcca

SEQ ID NO: 2927 - DNA, 36 bp, Artificial Sequence
  Synthetic oligonucleotide
gcgcaaccatcactataacccatttacctgttttca

SEQ ID NO: 2928 - DNA, 38 bp, Artificial Sequence
  Synthetic oligonucleotide
gcgcaccacacttgagttctttaactttccctttatga

SEQ ID NO: 2929 - DNA, 35 bp, Artificial Sequence
  Synthetic oligonucleotide
gccgacgtacctgctgggtctctctattcattttt

SEQ ID NO: 2930 - DNA, 35 bp, Artificial Sequence
  Synthetic oligonucleotide
tacgccgtccaccatcctcttctatatacctaacc

SEQ ID NO: 2931 - DNA, 35 bp, Artificial Sequence
  Synthetic oligonucleotide
tactacgaaccatcccactctttgcacctgttttc

SEQ ID NO: 2932 - DNA, 34 bp, Artificial Sequence
  Synthetic oligonucleotide
tcatgcgcggtacacatttcttaatcacttttct

SEQ ID NO: 2933 - DNA, 35 bp, Artificial Sequence
  Synthetic oligonucleotide
tgcgggcattggtgcaatcttaacttattctttat

SEQ ID NO: 2934 - DNA, 35 bp, Artificial Sequence
  Synthetic oligonucleotide
tggtagtgctgcatcaccgatcatccttttacatt

SEQ ID NO: 2935 - DNA, 37 bp, Artificial Sequence
  Synthetic oligonucleotide
tccgcgactgttcatcccccatcccaacataacccga

SEQ ID NO: 2936 - DNA, 38 bp, Artificial Sequence
  Synthetic oligonucleotide
tgtgaacgtcactgcaccctaaactaatattcccttga

SEQ ID NO: 2937 - DNA, 36 bp, Artificial Sequence
  Synthetic oligonucleotide
ttgacaactgccactaccaactgaacccgctactta

SEQ ID NO: 2938 - DNA, 38 bp, Artificial Sequence
  Synthetic oligonucleotide
ttgtcaagcgctatccaccatttctcttttatctatga

SEQ ID NO: 2939 - DNA, 35 bp, Artificial Sequence
  Synthetic oligonucleotide
caatgcgacgaggcttctatgtcatgaactaagct

SEQ ID NO: 2940 - DNA, 37 bp, Artificial Sequence
  Synthetic oligonucleotide
ccgaacggtcgcaaagtggtgtagcctctaatccgga

SEQ ID NO: 2941 - DNA, 35 bp, Artificial Sequence; identical to SEQ ID NO: 2877
  Synthetic oligonucleotide

SEQ ID NO: 2942 - DNA, 38 bp, Artificial Sequence
  Synthetic oligonucleotide
accggaatgtacatgccctggtttttgttattatttga

SEQ ID NO: 2943 - DNA, 35 bp, Artificial Sequence
  Synthetic oligonucleotide
accatgcgcccaccactattttttccacttcctta

SEQ ID NO: 2944 - DNA, 37 bp, Artificial Sequence
  Synthetic oligonucleotide
acggagtaccctgcccactatataacttaaaccttga

SEQ ID NO: 2945 - DNA, 35 bp, Artificial Sequence
  Synthetic oligonucleotide
acgggcgtgtcgcactgtctgtcactggcttattc

SEQ ID NO: 2946 - DNA, 35 bp, Artificial Sequence
  Synthetic oligonucleotide
agacggtgggtgggtgggtggtgctgcagtctacc

SEQ ID NO: 2947 - DNA, 35 bp, Artificial Sequence
  Synthetic oligonucleotide
catgccgcaccccaacacgtaccatttcattattt

SEQ ID NO: 2948 - DNA, 36 bp, Artificial Sequence
  Synthetic oligonucleotide
catgcgggcatccttagcttaacctcaattccatta

SEQ ID NO: 2949 - DNA, 35 bp, Artificial Sequence
  Synthetic oligonucleotide
catggccattctaccctccattccattccttgcct

SEQ ID NO: 2950 - DNA, 35 bp, Artificial Sequence
  Synthetic oligonucleotide
cgttcggtacgcagtcatttcactctatcttgttc

SEQ ID NO: 2951 - DNA, 37 bp, Artificial Sequence
  Synthetic oligonucleotide
aacccacgagttgttggtccacgcctcgttatcacga

SEQ ID NO: 2952 - DNA, 36 bp, Artificial Sequence
  Synthetic oligonucleotide
aacccatgcctgccccatgtgcattcaggcagagca

SEQ ID NO: 2953 - DNA, 36 bp, Artificial Sequence
  Synthetic oligonucleotide
accgccacagtcatcaacccacctggccgacgacga

SEQ ID NO: 2954 - DNA, 36 bp, Artificial Sequence
  Synthetic oligonucleotide
gacaacgcaaccgcaggctcatggagccaatatgta

SEQ ID NO: 2955 - DNA, 37 bp, Artificial Sequence
  Synthetic oligonucleotide
gacaacacgtcgcatgatcttaaaagaggacctagga

SEQ ID NO: 2956 - DNA, 38 bp, Artificial Sequence
  Synthetic oligonucleotide
gagtggtcgccactcacaacgatgcggtatccccttga

SEQ ID NO: 2957 - DNA, 37 bp, Artificial Sequence
  Synthetic oligonucleotide
gcgtggtggtccgccggtggtgagtcgatgaactgga

SEQ ID NO: 2958 - DNA, 36 bp, Artificial Sequence
  Synthetic oligonucleotide
gtgatcgatagcgagtgttgagctgtcgagagtgga

SEQ ID NO: 2959 - DNA, 36 bp, Artificial Sequence
  Synthetic oligonucleotide
tcacacaccgcgtggctcggacgacaagtagtccta

SEQ ID NO: 2960 - DNA, 35 bp, Artificial Sequence
  Synthetic oligonucleotide
tgaacctgcacagctgttaagaggtggcttacgta

SEQ ID NO: 2961 - DNA, 35 bp, Artificial Sequence
  Synthetic oligonucleotide
actgaccacagctacgtaagcaataaccgatcgtt

SEQ ID NO: 2962 - DNA, 35 bp, Artificial Sequence
  Synthetic oligonucleotide
aagagtacgggcatgagtaataagggagtagccgt

SEQ ID NO: 2963 - DNA, 35 bp, Artificial Sequence
  Synthetic oligonucleotide
agatcgcggtcaatcggtgggtagttaggatcggg

SEQ ID NO: 2964 - DNA, 35 bp, Artificial Sequence
  Synthetic oligonucleotide
gaacacacgtcgatcgccactgagagcagatgtca

SEQ ID NO: 2965 - DNA, 35 bp, Artificial Sequence
  Synthetic oligonucleotide
atcggaggccgtatcaccatatcccaccaccactt

SEQ ID NO: 2966 - DNA, 34 bp, Artificial Sequence
  Synthetic oligonucleotide
cttattttagcaagatcttttatctaaatacaat

SEQ ID NO: 2967 - DNA, 36 bp, Artificial Sequence
  Synthetic oligonucleotide
gacaaacgtagtgctgaacatggcgttctggtccaa

SEQ ID NO: 2968 - DNA, 35 bp, Artificial Sequence
  Synthetic oligonucleotide
ataccgggacaggcgacagaagggtgaaccaatgt

SEQ ID NO: 2969 - DNA, 37 bp, Artificial Sequence
  Synthetic oligonucleotide
gagtggacgtggacgcgaaacgggtcaggcataacga

SEQ ID NO: 2970 - DNA, 36 bp, Artificial Sequence
  Synthetic oligonucleotide
taccacgtggcgcctgacgacttacgcaactgggga

SEQ ID NO: 2971 - DNA, 36 bp, Artificial Sequence
  Synthetic oligonucleotide
tacagccgacatgaacatcccttaatcccaccctaa

SEQ ID NO: 2972 - DNA, 37 bp, Artificial Sequence
  Synthetic oligonucleotide
tgataccgcgcaacgagacttaccacgtcaggatgga

SEQ ID NO: 2973 - DNA, 36 bp, Artificial Sequence
  Synthetic oligonucleotide
atggtgggagcaccgacgtaggaggcctatggcgta

SEQ ID NO: 2974 - DNA, 37 bp, Artificial Sequence; identical to SEQ ID NO: 2955
  Synthetic oligonucleotide

SEQ ID NO: 2975 - DNA, 38 bp, Artificial Sequence
  Synthetic oligonucleotide
gtgaacgtcgctagaaacgatggtgtaaatagtcttga

SEQ ID NO: 2976 - DNA, 36 bp, Artificial Sequence; identical to SEQ ID NO: 2958
  Synthetic oligonucleotide

SEQ ID NO: 2977 - DNA, 37 bp, Artificial Sequence
  Synthetic oligonucleotide
aacacgcaacacacaactctcggcaaatccagcgcga

SEQ ID NO: 2978 - DNA, 37 bp, Artificial Sequence
  Synthetic oligonucleotide
acgacgcaccctgccactatcgtagatactccgacta

SEQ ID NO: 2979 - DNA, 36 bp, Artificial Sequence
  Synthetic oligonucleotide
gaccaatggaccggggactactctgagaaagcgcga

SEQ ID NO: 2980 - DNA, 36 bp, Artificial Sequence
  Synthetic oligonucleotide
agtggaacgcaccgaagttacctacctgagatggga

SEQ ID NO: 2981 - DNA, 37 bp, Artificial Sequence
  Synthetic oligonucleotide
gacgacggggatcctgacaattcctgactaagcgcga

SEQ ID NO: 2982 - DNA, 35 bp, Artificial Sequence
  Synthetic oligonucleotide
gacccgcccagtaagcacacacacagcccaaattt

SEQ ID NO: 2983 - DNA, 37 bp, Artificial Sequence
  Synthetic oligonucleotide
gagcggactcgaatagaactccgcaacaccagcgcga

SEQ ID NO: 2984 - DNA, 37 bp, Artificial Sequence
  Synthetic oligonucleotide
gagacgaggccgggatcatgctagggatcggacagga

SEQ ID NO: 2985 - DNA, 36 bp, Artificial Sequence
  Synthetic oligonucleotide
taccgacaccctcgtgttcccaaacaaggagacgga

SEQ ID NO: 2986 - DNA, 37 bp, Artificial Sequence
  Synthetic oligonucleotide
ggatacgcaccttaaggagggacgaataaaagcgcga

SEQ ID NO: 2987 - DNA, 36 bp, Artificial Sequence
  Synthetic oligonucleotide
tagcacagtggtgcttacggaacatcaccagcgcga

SEQ ID NO: 2988 - DNA, 37 bp, Artificial Sequence
  Synthetic oligonucleotide
tagtcggtcggcctgccgatgcgtcaaggtagcgcga

SEQ ID NO: 2989 - DNA, 37 bp, Artificial Sequence
  Synthetic oligonucleotide
taggaatcaccggctcgggcgaggccgggaagcgcga

SEQ ID NO: 2990 - DNA, 37 bp, Artificial Sequence
  Synthetic oligonucleotide
tgagccgcaaccggcaaacaaggcttcaacagcgcga

SEQ ID NO: 2991 - DNA, 36 bp, Artificial Sequence
  Synthetic oligonucleotide
aacaccacaccgccgctgatccggatggaacctcga

SEQ ID NO: 2992 - DNA, 35 bp, Artificial Sequence; identical to SEQ ID NO: 2962
  Synthetic oligonucleotide

SEQ ID NO: 2993 - DNA, 36 bp, Artificial Sequence
  Synthetic oligonucleotide
acacgtgccccaccaatatgcgataagactttgtta

SEQ ID NO: 2994 - DNA, 36 bp, Artificial Sequence
  Synthetic oligonucleotide
gacaccgaagacgaggctaaagagagaagtgccata

SEQ ID NO: 2995 - DNA, 35 bp, Artificial Sequence
  Synthetic oligonucleotide
atcgccgcacacctgccactcactcttccatcgct

SEQ ID NO: 2996 - DNA, 34 bp, Artificial Sequence; identical to SEQ ID NO: 2966
  Synthetic oligonucleotide

SEQ ID NO: 2997 - DNA, 36 bp, Artificial Sequence
  Synthetic oligonucleotide
gactaacgccgcttatcctcaacgcctaaccttgtt

SEQ ID NO: 2998 - DNA, 37 bp, Artificial Sequence
  Synthetic oligonucleotide
gagtggtcgcctgcaggtgcattccatccagctccga

SEQ ID NO: 2999 - DNA, 35 bp, Artificial Sequence
  Synthetic oligonucleotide
gtggaggctgcaatacggtgcaagagagcttaggg

SEQ ID NO: 3000 - DNA, 37 bp, Artificial Sequence
  Synthetic oligonucleotide
gtcaccgcatgcgggtcaagccctcaactttacttga

SEQ ID NO: 3001 - DNA, 37 bp, Artificial Sequence
  Synthetic oligonucleotide
taagtcgcgccccagtcagtgattgatacagatagga

SEQ ID NO: 3002 - DNA, 36 bp, Artificial Sequence
  Synthetic oligonucleotide
tcaacatgcgtgcaagtggcaccgttctcgtttcga

SEQ ID NO: 3003 - DNA, 34 bp, Artificial Sequence
  Synthetic oligonucleotide
tcttatttagcaagatcttttatctaaatacaat

SEQ ID NO: 3004 - DNA, 37 bp, Artificial Sequence; identical to SEQ ID NO: 2977
  Synthetic oligonucleotide

SEQ ID NO: 3005 - DNA, 37 bp, Artificial Sequence; identical to SEQ ID NO: 2978
  Synthetic oligonucleotide

SEQ ID NO: 3006 - DNA, 36 bp, Artificial Sequence; identical to SEQ ID NO: 2979
  Synthetic oligonucleotide

SEQ ID NO: 3007 - DNA, 37 bp, Artificial Sequence; identical to SEQ ID NO: 2981
  Synthetic oligonucleotide

SEQ ID NO: 3008 - DNA, 37 bp, Artificial Sequence; identical to SEQ ID NO: 2983
  Synthetic oligonucleotide

SEQ ID NO: 3009 - DNA, 37 bp, Artificial Sequence; identical to SEQ ID NO: 2984
  Synthetic oligonucleotide

SEQ ID NO: 3010 - DNA, 36 bp, Artificial Sequence
  Synthetic oligonucleotide
tacgcgggtggtcgaccccactagtagtcatccata

SEQ ID NO: 3011 - DNA, 36 bp, Artificial Sequence; identical to SEQ ID NO: 2985
  Synthetic oligonucleotide

SEQ ID NO: 3012 - DNA, 37 bp, Artificial Sequence; identical to SEQ ID NO: 2986
  Synthetic oligonucleotide

SEQ ID NO: 3013 - DNA, 36 bp, Artificial Sequence; identical to SEQ ID NO: 2987
  Synthetic oligonucleotide

SEQ ID NO: 3014 - DNA, 37 bp, Artificial Sequence; identical to SEQ ID NO: 2988
  Synthetic oligonucleotide

SEQ ID NO: 3015 - DNA, 37 bp, Artificial Sequence; identical to SEQ ID NO: 2989
  Synthetic oligonucleotide

SEQ ID NO: 3016 - DNA, 38 bp, Artificial Sequence
  Synthetic oligonucleotide
tccgaacgggacgtacaccaagccgagctctatcctga

SEQ ID NO: 3017 - DNA, 37 bp, Artificial Sequence; identical to SEQ ID NO: 2990
  Synthetic oligonucleotide

SEQ ID NO: 3018 - DNA, 36 bp, Artificial Sequence
  Synthetic oligonucleotide
accatcgggtcacgtaaaagcggttctaatttctaa

SEQ ID NO: 3019 - DNA, 35 bp, Artificial Sequence; identical to SEQ ID NO: 721
  Synthetic oligonucleotide

SEQ ID NO: 3020 - DNA, 36 bp, Artificial Sequence
  Synthetic oligonucleotide
gaacaggcgttccctactgatttatctgtccccata

SEQ ID NO: 3021 - DNA, 36 bp, Artificial Sequence
  Synthetic oligonucleotide
gaccatgcgagcggcaaagcacggaaaatgtttgaa

SEQ ID NO: 3022 - DNA, 38 bp, Artificial Sequence
  Synthetic oligonucleotide
gagtcatgtccgcctttaacccgacttaagaactttga

SEQ ID NO: 3023 - DNA, 38 bp, Artificial Sequence
  Synthetic oligonucleotide
gcaagatgaagttggtactttcctctctattcttttga

SEQ ID NO: 3024 - DNA, 37 bp, Artificial Sequence
  Synthetic oligonucleotide
gccacaccgcccgtacatacttcctcaccaacattga

SEQ ID NO: 3025 - DNA, 35 bp, Artificial Sequence
  Synthetic oligonucleotide
gcgcgcccaccagtatcttttggtctagataggca

SEQ ID NO: 3026 - DNA, 35 bp, Artificial Sequence
  Synthetic oligonucleotide
gggcccacgccaccgtttgtccacaggaaggatac

SEQ ID NO: 3027 - DNA, 37 bp, Artificial Sequence
  Synthetic oligonucleotide
gtgcggtcatggaattcttttaagcatgataatacga

SEQ ID NO: 3028 - DNA, 35 bp, Artificial Sequence
  Synthetic oligonucleotide
ttgcaaagcgcaccgtccgagccggtggcaccgaa

SEQ ID NO: 3029 - DNA, 37 bp, Artificial Sequence
  Synthetic oligonucleotide
ttcacgccacattcacgggaactgagagtgacgacga

SEQ ID NO: 3030 - DNA, 37 bp, Artificial Sequence
  Synthetic oligonucleotide
tttgcggtcattaacttgcgtgtaggacaccggtgga

SEQ ID NO: 3031 - DNA, 35 bp, Artificial Sequence
  Synthetic oligonucleotide
acgcagtgccgccgaatcctgatcccctaactttc

SEQ ID NO: 3032 - DNA, 35 bp, Artificial Sequence
  Synthetic oligonucleotide
aatgcgtccgacctaactgttgcgattcttctttt

SEQ ID NO: 3033 - DNA, 38 bp, Artificial Sequence
  Synthetic oligonucleotide
acacacaagtccatgcgggcctcacttttcgcctatga

SEQ ID NO: 3034 - DNA, 36 bp, Artificial Sequence
  Synthetic oligonucleotide
agtcccaactgcagggtttatacctctggttctctc

SEQ ID NO: 3035 - DNA, 36 bp, Artificial Sequence
  Synthetic oligonucleotide
gcacacgcccacattgtcctactagctattttatta

SEQ ID NO: 3036 - DNA, 38 bp, Artificial Sequence
  Synthetic oligonucleotide
gccgcccctgagtagttttcgtttttcttgtcctctga

SEQ ID NO: 3037 - DNA, 35 bp, Artificial Sequence
  Synthetic oligonucleotide
gcgatcgatatgttgcctatcctcttacgacatct

SEQ ID NO: 3038 - DNA, 35 bp, Artificial Sequence
  Synthetic oligonucleotide
gcgttgtccgtgtccatccatcttgtcatttgttt

SEQ ID NO: 3039 - DNA, 35 bp, Artificial Sequence
  Synthetic oligonucleotide
taacgtacaaccgggcgcacaggccattcttctac

SEQ ID NO: 3040 - DNA, 35 bp, Artificial Sequence
  Synthetic oligonucleotide
gttcggggtgcatgtcgtgaagccgctaacctctt

SEQ ID NO: 3041 - DNA, 38 bp, Artificial Sequence
  Synthetic oligonucleotide
tgctcagtcaagcgagtaccactacgcctattccgtga

SEQ ID NO: 3042 - DNA, 38 bp, Artificial Sequence
  Synthetic oligonucleotide
tgctaaacgtactggggcttcctcagatctttgcttga

SEQ ID NO: 3043 - DNA, 36 bp, Artificial Sequence
  Synthetic oligonucleotide
tgtacccccgccgtaatcatctatcttgtccccgaa

SEQ ID NO: 3044 - DNA, 35 bp, Artificial Sequence
  Synthetic oligonucleotide
accactgaactcatggtactaatcacacaccaatt

SEQ ID NO: 3045 - DNA, 37 bp, Artificial Sequence
  Synthetic oligonucleotide
actgtacagtagtccacgaacatatcgctttctatga

SEQ ID NO: 3046 - DNA, 38 bp, Artificial Sequence
  Synthetic oligonucleotide
accgcgcgctgcagtatatcccacttcgttctatatga

SEQ ID NO: 3047 - DNA, 35 bp, Artificial Sequence
  Synthetic oligonucleotide
agtggatcactgggcggagtgcgttaggaagacgg

SEQ ID NO: 3048 - DNA, 35 bp, Artificial Sequence
  Synthetic oligonucleotide
gattacgccttaagtggtactcagttatgaggaga

SEQ ID NO: 3049 - DNA, 37 bp, Artificial Sequence
  Synthetic oligonucleotide
gcgtaggtcatgcgacgtataaccttcccacaaatga

SEQ ID NO: 3050 - DNA, 37 bp, Artificial Sequence
  Synthetic oligonucleotide
tacaccaaaaagatcggtgattaccatgcaacaagga

SEQ ID NO: 3051 - DNA, 35 bp, Artificial Sequence
  Synthetic oligonucleotide
taccagacgtaccgcacacctttcatctgcctaac

SEQ ID NO: 3052 - DNA, 35 bp, Artificial Sequence
  Synthetic oligonucleotide
tttgagactgcgggctgtgcgttgctttgatatcc

SEQ ID NO: 3053 - DNA, 35 bp, Artificial Sequence
  Synthetic oligonucleotide
actgactgcatacatccgcatattaaacccgtatt

SEQ ID NO: 3054 - DNA, 36 bp, Artificial Sequence
  Synthetic oligonucleotide
acatctccaggattccccttcagccatggccctaca

SEQ ID NO: 3055 - DNA, 38 bp, Artificial Sequence
  Synthetic oligonucleotide
acgctcagctggcatgtaccccccctctctacacttga

SEQ ID NO: 3056 - DNA, 36 bp, Artificial Sequence
  Synthetic oligonucleotide
actcgcgtgtccaacacggactgcagtagcaatcca

SEQ ID NO: 3057 - DNA, 37 bp, Artificial Sequence
  Synthetic oligonucleotide
gcaggtggtgcaggttattcatgcgaaagggtactga

SEQ ID NO: 3058 - DNA, 36 bp, Artificial Sequence
  Synthetic oligonucleotide
gcggtggaaacgtaatcggacactgcgcatgcgaca

SEQ ID NO: 3059 - DNA, 36 bp, Artificial Sequence
  Synthetic oligonucleotide
tgaacctgcgatggtccgtgcgaacccgatctcaca

SEQ ID NO: 3060 - DNA, 35 bp, Artificial Sequence
  Synthetic oligonucleotide
tcacgtccccaacaacccggagtaattccctgcca

SEQ ID NO: 3061 - DNA, 35 bp, Artificial Sequence
  Synthetic oligonucleotide
tgggtacacatccggcatgccaataacgcttaagt

SEQ ID NO: 3062 - DNA, 35 bp, Artificial Sequence
  Synthetic oligonucleotide
acgcctgtacgatgtcctcggtctcattttatttc

SEQ ID NO: 3063 - DNA, 35 bp, Artificial Sequence
  Synthetic oligonucleotide
aaacgtcaagggaaagcgtagtctcctcgaccctt

SEQ ID NO: 3064 - DNA, 36 bp, Artificial Sequence
  Synthetic oligonucleotide
actgggaagtacgctgtcaggcatttgctaactaaa

SEQ ID NO: 3065 - DNA, 35 bp, Artificial Sequence
  Synthetic oligonucleotide
aatcattgcaggtatatgcgagcgaactacgattc

SEQ ID NO: 3066 - DNA, 35 bp, Artificial Sequence
  Synthetic oligonucleotide
atacgttccggccaactgaaacggagttcgggtct

SEQ ID NO: 3067 - DNA, 36 bp, Artificial Sequence
  Synthetic oligonucleotide
atgcatagctgcccttcttatccgtttccaactaca

SEQ ID NO: 3068 - DNA, 38 bp, Artificial Sequence
  Synthetic oligonucleotide
atgcgaaactgtaagcacccttccaccttgtaccatga

SEQ ID NO: 3069 - DNA, 38 bp, Artificial Sequence
  Synthetic oligonucleotide
gacgccgaaacactaagcttttaacacttacgatatga

SEQ ID NO: 3070 - DNA, 35 bp, Artificial Sequence
  Synthetic oligonucleotide
attatcccagcgatcccgagtcccggcatttactg

SEQ ID NO: 3071 - DNA, 36 bp, Artificial Sequence
  Synthetic oligonucleotide
catgcgcatatcgctccgttcgttcctcaatttcca

SEQ ID NO: 3072 - DNA, 38 bp, Artificial Sequence
  Synthetic oligonucleotide
gcccgaacccgaaaaccgatcgcctgaatcccaattga

SEQ ID NO: 3073 - DNA, 35 bp, Artificial Sequence
  Synthetic oligonucleotide
gcaggctcgcgtagcttcaaactagcagaccacgt

SEQ ID NO: 3074 - DNA, 38 bp, Artificial Sequence
  Synthetic oligonucleotide
gcacgggacgcaagctagactacacaccgactttttga

SEQ ID NO: 3075 - DNA, 38 bp, Artificial Sequence
  Synthetic oligonucleotide
gctggcactgcgaatatcgatctacactatcccactga

SEQ ID NO: 3076 - DNA, 36 bp, Artificial Sequence
  Synthetic oligonucleotide
gctagcacacaggatccctctttattagcacttcaa

SEQ ID NO: 3077 - DNA, 35 bp, Artificial Sequence
  Synthetic oligonucleotide
tatgcgacccgttaaacccgtactcttcctaaact

SEQ ID NO: 3078 - DNA, 38 bp, Artificial Sequence
  Synthetic oligonucleotide
tagtcatgcgcgcatctcaaaatttacttctcaaatga

SEQ ID NO: 3079 - DNA, 38 bp, Artificial Sequence
  Synthetic oligonucleotide
tctacactccgctccttgacctaatttaaagaccttga

SEQ ID NO: 3080 - DNA, 35 bp, Artificial Sequence
  Synthetic oligonucleotide
tcgcggaaacctgcccctgcatcgtagccatccac

SEQ ID NO: 3081 - DNA, 36 bp, Artificial Sequence
  Synthetic oligonucleotide
ttcaccaccacccctttggacccttttaccgagaga

SEQ ID NO: 3082 - DNA, 36 bp, Artificial Sequence
  Synthetic oligonucleotide
ttgcagacctcatttacgcacttgggacttctgcca

SEQ ID NO: 3083 - DNA, 37 bp, Artificial Sequence
  Synthetic oligonucleotide
ttggcacctccactgcttgttctcgattcatgtgcga

SEQ ID NO: 3084 - DNA, 35 bp, Artificial Sequence
  Synthetic oligonucleotide
actgcggtcatcgagttactggctattgcctgacc

SEQ ID NO: 3085 - DNA, 36 bp, Artificial Sequence
  Synthetic oligonucleotide
cccgcggtaatagtgcgggcggacgcggtcatgaca

SEQ ID NO: 3086 - DNA, 36 bp, Artificial Sequence
  Synthetic oligonucleotide
gaacgtagactgactacggtccacacgcccattgta

SEQ ID NO: 3087 - DNA, 35 bp, Artificial Sequence
  Synthetic oligonucleotide
ccaacgacagatatggacgtgctgcgggggcaatc

SEQ ID NO: 3088 - DNA, 35 bp, Artificial Sequence
  Synthetic oligonucleotide
atgcgatgtcacgtgacgtgagtaaccgcccaccc

SEQ ID NO: 3089 - DNA, 35 bp, Artificial Sequence
  Synthetic oligonucleotide
gcccacccttgccagcatgtatgcttgcatgtaac

SEQ ID NO: 3090 - DNA, 35 bp, Artificial Sequence
  Synthetic oligonucleotide
gccggtcatgcggtttgcacaccactccattctac

SEQ ID NO: 3091 - DNA, 36 bp, Artificial Sequence
  Synthetic oligonucleotide
gccaggcccattccttgcgggaggttaacaccagca

SEQ ID NO: 3092 - DNA, 36 bp, Artificial Sequence; identical to SEQ ID NO: 3058
  Synthetic oligonucleotide

SEQ ID NO: 3093 - DNA, 37 bp, Artificial Sequence
  Synthetic oligonucleotide
gtttcaccccggctgggctagttctgttaatgcgaga

SEQ ID NO: 3094 - DNA, 36 bp, Artificial Sequence
  Synthetic oligonucleotide
tgtaccgcggttgcgactatttccttactgcccata

SEQ ID NO: 3095 - DNA, 35 bp, Artificial Sequence
  Synthetic oligonucleotide
ttcgcgacgataactagttgcatgtctgaattcac

SEQ ID NO: 3096 - DNA, 37 bp, Artificial Sequence
  Synthetic oligonucleotide
tgtcactgcacgatgagactttcggcgaatatactga

SEQ ID NO: 3097 - DNA, 36 bp, Artificial Sequence
  Synthetic oligonucleotide
aatgcattgcgttatttcaattgaggcgtcctaaaa

SEQ ID NO: 3098 - DNA, 38 bp, Artificial Sequence
  Synthetic oligonucleotide
gcactgccaactttcttctggggactatttagctttga

SEQ ID NO: 3099 - DNA, 36 bp, Artificial Sequence
  Synthetic oligonucleotide
ggtaccaaaagtactgccatgagagccacttcccaa

SEQ ID NO: 3100 - DNA, 35 bp, Artificial Sequence
  Synthetic oligonucleotide
catacgcacggtcctctactataattgtccaccaa

SEQ ID NO: 3101 - DNA, 35 bp, Artificial Sequence
  Synthetic oligonucleotide
atgctgcggtaatggagccggttcttaaactgcct

SEQ ID NO: 3102 - DNA, 36 bp, Artificial Sequence
  Synthetic oligonucleotide
agttactgacaggcgcgtctttcgcaacactttata

SEQ ID NO: 3103 - DNA, 35 bp, Artificial Sequence
  Synthetic oligonucleotide
gcacccgagcctaatagtcctctattccccttcca

SEQ ID NO: 3104 - DNA, 36 bp, Artificial Sequence
  Synthetic oligonucleotide
gcgagcagtccatggcccatcctcgacttaacctca

SEQ ID NO: 3105 - DNA, 36 bp, Artificial Sequence
  Synthetic oligonucleotide
ggtagcaggcataccctacggaacagttctgtggca

SEQ ID NO: 3106 - DNA, 36 bp, Artificial Sequence
  Synthetic oligonucleotide
taggcacgtgcatcaggcgttctttgcccctgttta

SEQ ID NO: 3107 - DNA, 35 bp, Artificial Sequence
  Synthetic oligonucleotide
tgtgcagtcagtgaacggtgacctagttatgattt

SEQ ID NO: 3108 - DNA, 38 bp, Artificial Sequence
  Synthetic oligonucleotide
agcccgttgctacgttgcagtaggtgtaacttcactga

SEQ ID NO: 3109 - DNA, 38 bp, Artificial Sequence
  Synthetic oligonucleotide
actaactgcaagcgcccttggcccgatttgacctttga

SEQ ID NO: 3110 - DNA, 35 bp, Artificial Sequence
  Synthetic oligonucleotide
actaccgcaaactgcactgtttaaaactccttgaa

SEQ ID NO: 3111 - DNA, 35 bp, Artificial Sequence
  Synthetic oligonucleotide
acgactatcgtacatgtgcgtagtttagattccaa

SEQ ID NO: 3112 - DNA, 37 bp, Artificial Sequence
  Synthetic oligonucleotide
agttgaccacggagtgtactgcaatggagtgtaccga

SEQ ID NO: 3113 - DNA, 36 bp, Artificial Sequence
  Synthetic oligonucleotide
gaacgagcccggatgttaggatcctcgatttgcgta

SEQ ID NO: 3114 - DNA, 35 bp, Artificial Sequence
  Synthetic oligonucleotide
agtgctgccactaagctagaaaagttttcatgccc

SEQ ID NO: 3115 - DNA, 36 bp, Artificial Sequence
  Synthetic oligonucleotide
atcgtaacggactgctatttgtacggatccctataa

SEQ ID NO: 3116 - DNA, 38 bp, Artificial Sequence
  Synthetic oligonucleotide
gcagtctagcgcccgcttgtaccacatcctcgctttga

SEQ ID NO: 3117 - DNA, 35 bp, Artificial Sequence
  Synthetic oligonucleotide
tgtactgagtgcacaacacgtgatgatgatatctt

SEQ ID NO: 3118 - DNA, 36 bp, Artificial Sequence
  Synthetic oligonucleotide
agcggtcaccgcctatggttattcatttttctctta

SEQ ID NO: 3119 - DNA, 35 bp, Artificial Sequence
  Synthetic oligonucleotide
actcagcgatgccctaacttggacgttcggctact

SEQ ID NO: 3120 - DNA, 35 bp, Artificial Sequence
  Synthetic oligonucleotide
cacaccgacgaaactgtcctcgcctactacctatc

SEQ ID NO: 3121 - DNA, 35 bp, Artificial Sequence
  Synthetic oligonucleotide
agtgaggcgtcacggctattactccgtgctaattt

SEQ ID NO: 3122 - DNA, 35 bp, Artificial Sequence; identical to SEQ ID NO: 3100
  Synthetic oligonucleotide

SEQ ID NO: 3123 - DNA, 35 bp, Artificial Sequence
  Synthetic oligonucleotide
gaaacggccatgaaccttttaatctttccaccttt

SEQ ID NO: 3124 - DNA, 36 bp, Artificial Sequence
  Synthetic oligonucleotide
gcgagaggatcaccgtgaggcttcccaactatttta

SEQ ID NO: 3125 - DNA, 35 bp, Artificial Sequence
  Synthetic oligonucleotide
gcgaggcgccctccaacccaacccattcaatggta

SEQ ID NO: 3126 - DNA, 35 bp, Artificial Sequence
  Synthetic oligonucleotide
gcgcagtccgtccacatttggtctactgctttcct

SEQ ID NO: 3127 - DNA, 35 bp, Artificial Sequence
  Synthetic oligonucleotide
gtgcgcctacatatatctcggttacaacctttttc

SEQ ID NO: 3128 - DNA, 35 bp, Artificial Sequence
  Synthetic oligonucleotide
tgcatcccaccactatgatatacctaatgccctct

SEQ ID NO: 3129 - DNA, 36 bp, Artificial Sequence
  Synthetic oligonucleotide
tgcaggccgcatcacctcttgtgccggttcatcaaa

SEQ ID NO: 3130 - DNA, 38 bp, Artificial Sequence
  Synthetic oligonucleotide
tgcgaggctagcttgttgccactatttggtccttatga

SEQ ID NO: 3131 - DNA, 38 bp, Artificial Sequence; identical to SEQ ID NO: 3108
  Synthetic oligonucleotide

SEQ ID NO: 3132 - DNA, 35 bp, Artificial Sequence
  Synthetic oligonucleotide
agggcaacgaacgcaggaatccctcattcctacgg

SEQ ID NO: 3133 - DNA, 35 bp, Artificial Sequence; identical to SEQ ID NO: 3114
  Synthetic oligonucleotide

SEQ ID NO: 3134 - DNA, 35 bp, Artificial Sequence
  Synthetic oligonucleotide
atcctcgttacgtgcacggacttctcatgcgaact

SEQ ID NO: 3135 - DNA, 36 bp, Artificial Sequence
  Synthetic oligonucleotide
gcccaggtttgacgactgccgtgcgctcggtcttaa

SEQ ID NO: 3136 - DNA, 37 bp, Artificial Sequence
  Synthetic oligonucleotide
ggtcatggcgcaacttcatcttttcacacctgattga

SEQ ID NO: 3137 - DNA, 36 bp, Artificial Sequence; identical to SEQ ID NO: 3105
  Synthetic oligonucleotide

SEQ ID NO: 3138 - DNA, 35 bp, Artificial Sequence
  Synthetic oligonucleotide
tcccgcaattacgcagaccgactacgattccaaaa

SEQ ID NO: 3139 - DNA, 38 bp, Artificial Sequence
  Synthetic oligonucleotide
tgtacgtaggtaagcgatacacactgcacccctactga

SEQ ID NO: 3140 - DNA, 35 bp, Artificial Sequence
  Synthetic oligonucleotide
tgacctctgcagtggccagcccattctttagcttc

SEQ ID NO: 3141 - DNA, 35 bp, Artificial Sequence
  Synthetic oligonucleotide
ttactgcaggtgcgatcgcgttctccaacatctct

SEQ ID NO: 3142 - DNA, 37 bp, Artificial Sequence
  Synthetic oligonucleotide
accacgttggttattgccctgctttgaagtcttacga

SEQ ID NO: 3143 - DNA, 36 bp, Artificial Sequence
  Synthetic oligonucleotide
aacacactgcgcctttactttaattttcgattatta

SEQ ID NO: 3144 - DNA, 35 bp, Artificial Sequence
  Synthetic oligonucleotide
agcaccgacgtgataggactgtaatgccctcctct

SEQ ID NO: 3145 - DNA, 35 bp, Artificial Sequence
  Synthetic oligonucleotide
atgcgcgagtcataaggcgtttcttttcactggct

SEQ ID NO: 3146 - DNA, 35 bp, Artificial Sequence
  Synthetic oligonucleotide
atgcgacatgcgttacaataatccgcgcaagccgc

SEQ ID NO: 3147 - DNA, 35 bp, Artificial Sequence
  Synthetic oligonucleotide
gagtgcgcgtacaatttgtcctcttgccgcttttt

SEQ ID NO: 3148 - DNA, 35 bp, Artificial Sequence
  Synthetic oligonucleotide
taagtcatgggcctcatctatacctgatcgatctc

SEQ ID NO: 3149 - DNA, 36 bp, Artificial Sequence
  Synthetic oligonucleotide
tcaggcgggatatgcgctcagggaagcggggagcaa

SEQ ID NO: 3150 - DNA, 37 bp, Artificial Sequence
  Synthetic oligonucleotide
tgagctcgacctgccgtcgtacaatttcccttactga

SEQ ID NO: 3151 - DNA, 38 bp, Artificial Sequence
  Synthetic oligonucleotide
acttaccgcttaatacacttgccggaccttgtgcttga

SEQ ID NO: 3152 - DNA, 35 bp, Artificial Sequence
  Synthetic oligonucleotide
actatagccacctaacccagcactaaacccacgca

SEQ ID NO: 3153 - DNA, 35 bp, Artificial Sequence
  Synthetic oligonucleotide
acccccccgcttcgtgcacttcactcccgaaatcc

SEQ ID NO: 3154 - DNA, 35 bp, Artificial Sequence
  Synthetic oligonucleotide
gccgcaccataactttagcctacccagtgccctgc

SEQ ID NO: 3155 - DNA, 36 bp, Artificial Sequence
  Synthetic oligonucleotide
tgccaccaaatacccaaccctagagtagccttatta

SEQ ID NO: 3156 - DNA, 37 bp, Artificial Sequence
  Synthetic oligonucleotide
actctagccacttgatccaccacgtcggttcccacga

SEQ ID NO: 3157 - DNA, 35 bp, Artificial Sequence
  Synthetic oligonucleotide
ttagcgataaacacatcatcccggacacgccgtgt

SEQ ID NO: 3158 - DNA, 38 bp, Artificial Sequence
  Synthetic oligonucleotide
taccgtcgctcaaaaccggcctaccctaaacccactga

SEQ ID NO: 3159 - DNA, 37 bp, Artificial Sequence
  Synthetic oligonucleotide
accgccgctctactctgtcaccgaacgccctttggga

SEQ ID NO: 3160 - DNA, 38 bp, Artificial Sequence
  Synthetic oligonucleotide
agcccgacccgcttgcctaaacccacccatgacactga

SEQ ID NO: 3161 - DNA, 35 bp, Artificial Sequence
  Synthetic oligonucleotide
aggtacccaccgcaaagcaccagtaaccacaaccc

SEQ ID NO: 3162 - DNA, 37 bp, Artificial Sequence
  Synthetic oligonucleotide
gcatccgaccaatagacccacacatctgtaccaaaga

SEQ ID NO: 3163 - DNA, 35 bp, Artificial Sequence
  Synthetic oligonucleotide
tcccgccgctaccgtaagccactccgaagtactca

SEQ ID NO: 3164 - DNA, 35 bp, Artificial Sequence
  Synthetic oligonucleotide
acgccagaccacccgatatccccccaaatggtaac

SEQ ID NO: 3165 - DNA, 38 bp, Artificial Sequence
  Synthetic oligonucleotide
aaacccacttcttacccggtaatctgccgaccgcatga

SEQ ID NO: 3166 - DNA, 35 bp, Artificial Sequence
  Synthetic oligonucleotide
acgcgtgggctactaaactccatcaccccgtgccc

SEQ ID NO: 3167 - DNA, 36 bp, Artificial Sequence
  Synthetic oligonucleotide
actattccgcatcattgagcacccgaccgaccaaaa

SEQ ID NO: 3168 - DNA, 35 bp, Artificial Sequence
  Synthetic oligonucleotide
acacaaaggctataaccgccgactctccaccagcc

SEQ ID NO: 3169 - DNA, 36 bp, Artificial Sequence
  Synthetic oligonucleotide
accaacaccaaccttctacgccgtaccctctgcaaa

SEQ ID NO: 3170 - DNA, 35 bp, Artificial Sequence
  Synthetic oligonucleotide
aaaccgctatttaccccggaccacgttgacaccga

SEQ ID NO: 3171 - DNA, 37 bp, Artificial Sequence
  Synthetic oligonucleotide
tacgtccaccccgaatcctaattcatacacctaaaga

SEQ ID NO: 3172 - DNA, 36 bp, Artificial Sequence
  Synthetic oligonucleotide
aaatgccacatcacttattcaccccgcgcaccccga

SEQ ID NO: 3173 - DNA, 37 bp, Artificial Sequence
  Synthetic oligonucleotide
acaatcaccttacaccttacgacctgcttaatagaga

SEQ ID NO: 3174 - DNA, 35 bp, Artificial Sequence
  Synthetic oligonucleotide
gttcgtgtacgtcgcattaaccctaccataaaacc

SEQ ID NO: 3175 - DNA, 37 bp, Artificial Sequence
  Synthetic oligonucleotide
gcgtatcaaaaaacccaccgctaactaccacaaccga

SEQ ID NO: 3176 - DNA, 38 bp, Artificial Sequence
  Synthetic oligonucleotide
gtgaacccacctgcgccctacactattaaacgagctga

SEQ ID NO: 3177 - DNA, 35 bp, Artificial Sequence
  Synthetic oligonucleotide
tcaacatgcccacatacaccagacacactatacac

SEQ ID NO: 3178 - DNA, 35 bp, Artificial Sequence
  Synthetic oligonucleotide
catgcaacccgcacttaggcgcgagccaattacca

SEQ ID NO: 3179 - DNA, 37 bp, Artificial Sequence
  Synthetic oligonucleotide
acccccaatccttataccataaacacatgaccggtga

SEQ ID NO: 3180 - DNA, 37 bp, Artificial Sequence
  Synthetic oligonucleotide
accggtcaaccccccacagaacatttcccgtcaccga

SEQ ID NO: 3181 - DNA, 37 bp, Artificial Sequence
  Synthetic oligonucleotide
acatgaatccaactaaaacccgctccgtgccgaacga

SEQ ID NO: 3182 - DNA, 35 bp, Artificial Sequence
  Synthetic oligonucleotide
atcccccaaacacaaacgcgagtttcccgggtcca

SEQ ID NO: 3183 - DNA, 38 bp, Artificial Sequence
  Synthetic oligonucleotide
ctctgcgcgagtcaccctcacctagatccctgatatga

SEQ ID NO: 3184 - DNA, 35 bp, Artificial Sequence
  Synthetic oligonucleotide
ctacccaacggtcacacccaccgcgtatccactac

SEQ ID NO: 3185 - DNA, 35 bp, Artificial Sequence
  Synthetic oligonucleotide
ttacacccgtcaactaaccatacccacgagagagc

SEQ ID NO: 3186 - DNA, 34 bp, Artificial Sequence
  Synthetic oligonucleotide
accccactactaccctctcgtccgcctaactgtc

SEQ ID NO: 3187 - DNA, 36 bp, Artificial Sequence
  Synthetic oligonucleotide
accagtccatatcccgccattgtgtcgttcgatcga

SEQ ID NO: 3188 - DNA, 37 bp, Artificial Sequence
  Synthetic oligonucleotide
gccaccccctaccctaacgacccaatatgactggtga

SEQ ID NO: 3189 - DNA, 38 bp, Artificial Sequence
  Synthetic oligonucleotide
caccaaatatcaagtgcctctctaaccttctgacctga

SEQ ID NO: 3190 - DNA, 36 bp, Artificial Sequence
  Synthetic oligonucleotide
actgtcactaccccacgcgcaaccaacaaataccca

SEQ ID NO: 3191 - DNA, 37 bp, Artificial Sequence
  Synthetic oligonucleotide
agctcgactaaaccacccgtataaaagctatacccga

SEQ ID NO: 3192 - DNA, 35 bp, Artificial Sequence
  Synthetic oligonucleotide
gagcgccctacttcaactcccaaaccacatgaccg

SEQ ID NO: 3193 - DNA, 35 bp, Artificial Sequence
  Synthetic oligonucleotide
aacaaagttcacccatcccacaaccccaattcgac

SEQ ID NO: 3194 - DNA, 37 bp, Artificial Sequence
  Synthetic oligonucleotide
cttctgacccgtagaccacaacttcccgacttcccga

SEQ ID NO: 3195 - DNA, 35 bp, Artificial Sequence
  Synthetic oligonucleotide
accccataccattaactccggattccccagtgctc

SEQ ID NO: 3196 - DNA, 38 bp, Artificial Sequence
  Synthetic oligonucleotide
agccacccacaaaacgcgcaatcagtaaacccacctga

SEQ ID NO: 3197 - DNA, 35 bp, Artificial Sequence
  Synthetic oligonucleotide
tcctaacgctgtcgacgccaccacccggacccact

SEQ ID NO: 3198 - DNA, 36 bp, Artificial Sequence
  Synthetic oligonucleotide
ccaatacccccgcgcccaatcccacacgttatcgta

SEQ ID NO: 3199 - DNA, 36 bp, Artificial Sequence
  Synthetic oligonucleotide
agcttacccactcccgaaagacaccctgacaccgta

SEQ ID NO: 3200 - DNA, 36 bp, Artificial Sequence
  Synthetic oligonucleotide
atgacctaatccaccacccctgcacctcagtctaca

SEQ ID NO: 3201 - DNA, 35 bp, Artificial Sequence
  Synthetic oligonucleotide
atcccgcacacctaaagcaaacgtggcttaggtcc

SEQ ID NO: 3202 - DNA, 37 bp, Artificial Sequence
  Synthetic oligonucleotide
atcctccgcccgggcactaaccagctcctgaccacga

SEQ ID NO: 3203 - DNA, 35 bp, Artificial Sequence
  Synthetic oligonucleotide
actgcgcccatcagataccaaaacctgcaaaccgc

SEQ ID NO: 3204 - DNA, 36 bp, Artificial Sequence
  Synthetic oligonucleotide
gccacccgcctttagccctacagatacacacactaa

SEQ ID NO: 3205 - DNA, 36 bp, Artificial Sequence
  Synthetic oligonucleotide
accccctacgccggctgactaaaccgcacaccctca

SEQ ID NO: 3206 - DNA, 36 bp, Artificial Sequence
  Synthetic oligonucleotide
gtttaccgtacccccttgcactgcccgaccaaccca

SEQ ID NO: 3207 - DNA, 35 bp, Artificial Sequence
  Synthetic oligonucleotide
actggaaccccaatcggagcgaagcctgactaccg

SEQ ID NO: 3208 - DNA, 37 bp, Artificial Sequence
  Synthetic oligonucleotide
tgccaacctaccataccatcaattgacagatacctga

SEQ ID NO: 3209 - DNA, 37 bp, Artificial Sequence
  Synthetic oligonucleotide
tcacccacgccatatactgcactccaaaccccgctga

SEQ ID NO: 3210 - DNA, 36 bp, Artificial Sequence
  Synthetic oligonucleotide
aaactgttcctgtgacaaaaccctcaacccatacca

SEQ ID NO: 3211 - DNA, 37 bp, Artificial Sequence
  Synthetic oligonucleotide
acgccacctacccacctcactatgaaatatactcgga

SEQ ID NO: 3212 - DNA, 35 bp, Artificial Sequence
  Synthetic oligonucleotide
gtccccttaagtccacccatacacgttactgaccc

SEQ ID NO: 3213 - DNA, 37 bp, Artificial Sequence
  Synthetic oligonucleotide
gagaacccaccagcaccaattcacaaacacttacgga

SEQ ID NO: 3214 - DNA, 36 bp, Artificial Sequence
  Synthetic oligonucleotide
acaagcctaacccgacccctagttctcacgttgaca

SEQ ID NO: 3215 - DNA, 38 bp, Artificial Sequence
  Synthetic oligonucleotide
acaccctccaaagcacaaacctacccattagccaatga

SEQ ID NO: 3216 - DNA, 36 bp, Artificial Sequence
  Synthetic oligonucleotide
aagtaccccaactcactgtaggtcactacgacaaca

SEQ ID NO: 3217 - DNA, 35 bp, Artificial Sequence
  Synthetic oligonucleotide
acgccgacccgatattttagcaaatatcacctacc

SEQ ID NO: 3218 - DNA, 38 bp, Artificial Sequence
  Synthetic oligonucleotide
acgttaacacccgcctcccacacccacttgacaggtga

SEQ ID NO: 3219 - DNA, 35 bp, Artificial Sequence
  Synthetic oligonucleotide
catcaagcagtcaacctgactcatcccatgtaccc

SEQ ID NO: 3220 - DNA, 37 bp, Artificial Sequence
  Synthetic oligonucleotide
acgcagttccaccacccattgtcaccaagatcatcga

SEQ ID NO: 3221 - DNA, 37 bp, Artificial Sequence
  Synthetic oligonucleotide
ctatgcaacacccgccttcgcacgttcacactaccga

SEQ ID NO: 3222 - DNA, 35 bp, Artificial Sequence
  Synthetic oligonucleotide
agcatgacacggcacctaccacccgaacgaccatc

SEQ ID NO: 3223 - DNA, 37 bp, Artificial Sequence
  Synthetic oligonucleotide
ttaataccgatttacacgctacccgtcccgggaggga

SEQ ID NO: 3224 - DNA, 37 bp, Artificial Sequence
  Synthetic oligonucleotide
aatacgctccagctcacctaaccctactaatcctcga

SEQ ID NO: 3225 - DNA, 35 bp, Artificial Sequence
  Synthetic oligonucleotide
acggaacaatcccccactatgctccacttcttact

SEQ ID NO: 3226 - DNA, 35 bp, Artificial Sequence
  Synthetic oligonucleotide
gcacacaaacattccaccaggtgacaaccccgaca

SEQ ID NO: 3227 - DNA, 37 bp, Artificial Sequence
  Synthetic oligonucleotide
atccgctctcacgacgccgaccaaacacattccggga

SEQ ID NO: 3228 - DNA, 35 bp, Artificial Sequence
  Synthetic oligonucleotide
tctgcacgcgaagctccgccgaccacaatacaaac

SEQ ID NO: 3229 - DNA, 36 bp, Artificial Sequence
  Synthetic oligonucleotide
tgaaatcgaccacttgagagcgtacttaagcacccg

SEQ ID NO: 3230 - DNA, 34 bp, Artificial Sequence
  Synthetic oligonucleotide
aaccgaatcccaggacctaactcatcccatgaaa

SEQ ID NO: 3231 - DNA, 35 bp, Artificial Sequence
  Synthetic oligonucleotide
atcctcctctgacctcgatctcccttaccaaacgg

SEQ ID NO: 3232 - DNA, 38 bp, Artificial Sequence
  Synthetic oligonucleotide
tggtccaacccccacgccgccatcactggacaacttga

SEQ ID NO: 3233 - DNA, 36 bp, Artificial Sequence
  Synthetic oligonucleotide
gcaccgcgcctctaccctacttacctaccccatcaa

SEQ ID NO: 3234 - DNA, 36 bp, Artificial Sequence
  Synthetic oligonucleotide
ggggcgcacgaaatcagaacaaccctaaaaccccta

SEQ ID NO: 3235 - DNA, 38 bp, Artificial Sequence
  Synthetic oligonucleotide
gactacccgctcactcacccgtcccaaattagatatga

SEQ ID NO: 3236 - DNA, 35 bp, Artificial Sequence
  Synthetic oligonucleotide
tacgccatcaaacccgatacctaaatttagcacac

SEQ ID NO: 3237 - DNA, 36 bp, Artificial Sequence
  Synthetic oligonucleotide
ttgcagaacacgaccaccaccgctttagagccacca

SEQ ID NO: 3238 - DNA, 35 bp, Artificial Sequence
  Synthetic oligonucleotide
taactcggtcctgatgctctacccgtatcaaccct

SEQ ID NO: 3239 - DNA, 35 bp, Artificial Sequence
  Synthetic oligonucleotide
ccgcatcccacagaactcggctactcaaaccacta

SEQ ID NO: 3240 - DNA, 35 bp, Artificial Sequence
  Synthetic oligonucleotide
gcagcactccacatcatcaaccatccacaaacctc

SEQ ID NO: 3241 - DNA, 35 bp, Artificial Sequence
  Synthetic oligonucleotide
actacatagaaggacccaaacatccctaccgcgct

SEQ ID NO: 3242 - DNA, 35 bp, Artificial Sequence
  Synthetic oligonucleotide
aacggcctaacacttagaaacctgactagccctac

SEQ ID NO: 3243 - DNA, 35 bp, Artificial Sequence
  Synthetic oligonucleotide
gccccgccgggctatccgcgacctagcctccctct

SEQ ID NO: 3244 - DNA, 36 bp, Artificial Sequence
  Synthetic oligonucleotide
gagtaatgctacccacaacccgcctaaaccatatca

SEQ ID NO: 3245 - DNA, 37 bp, Artificial Sequence
  Synthetic oligonucleotide
ctcactagactcccaactaaccttcttgctccctaga

SEQ ID NO: 3246 - DNA, 38 bp, Artificial Sequence
  Synthetic oligonucleotide
gaaactcaaacacactaagatcctaatcatatccatga

SEQ ID NO: 3247 - DNA, 38 bp, Artificial Sequence
  Synthetic oligonucleotide
gtcgtagcacgctccttacacgctttaatcctagatga

SEQ ID NO: 3248 - DNA, 35 bp, Artificial Sequence
  Synthetic oligonucleotide
aacgaaacggtctgctaccaccatccccacacacc

SEQ ID NO: 3249 - DNA, 35 bp, Artificial Sequence
  Synthetic oligonucleotide
ccccagagaacccgcacctagtcacacgaccactt

SEQ ID NO: 3250 - DNA, 35 bp, Artificial Sequence
  Synthetic oligonucleotide
ccgagtaccgtcattaatcaactagccgacaccac

SEQ ID NO: 3251 - DNA, 37 bp, Artificial Sequence
  Synthetic oligonucleotide
actgcccgattgtcgctggaattccgctatctccgga

SEQ ID NO: 3252 - DNA, 36 bp, Artificial Sequence
  Synthetic oligonucleotide
tgcgtccccacgaaaccatagccaacccaccggaca

SEQ ID NO: 3253 - DNA, 36 bp, Artificial Sequence
  Synthetic oligonucleotide
accgcaggtcatttcccagtactaccgacagacgca

SEQ ID NO: 3254 - DNA, 35 bp, Artificial Sequence
  Synthetic oligonucleotide
gcccttatgcaaaacccgcggaccggagaccatac

SEQ ID NO: 3255 - DNA, 38 bp, Artificial Sequence
  Synthetic oligonucleotide
acccataagcctagaaccaccctatcacacgaagttga

SEQ ID NO: 3256 - DNA, 37 bp, Artificial Sequence
  Synthetic oligonucleotide
tagtccgagcacgcctataaaatgagccctaattctg

SEQ ID NO: 3257 - DNA, 35 bp, Artificial Sequence
  Synthetic oligonucleotide
cacaccactcgtagctgtctgtcccccgctttagt

SEQ ID NO: 3258 - DNA, 37 bp, Artificial Sequence
  Synthetic oligonucleotide
cgttaccgtactaatcccacccaggcctattcgtgga

SEQ ID NO: 3259 - DNA, 36 bp, Artificial Sequence
  Synthetic oligonucleotide
gcccggggcccactagatccagactcaacaccgcca

SEQ ID NO: 3260 - DNA, 34 bp, Artificial Sequence
  Synthetic oligonucleotide
ccagcatatgccctacccgcatccgatcaactat

SEQ ID NO: 3261 - DNA, 35 bp, Artificial Sequence
  Synthetic oligonucleotide
tccatatcaaaccaccctaaccagacgaatcgggc

SEQ ID NO: 3262 - DNA, 37 bp, Artificial Sequence
  Synthetic oligonucleotide
acctttgaccgcccatgaactcaccgggggacggtga

SEQ ID NO: 3263 - DNA, 35 bp, Artificial Sequence
  Synthetic oligonucleotide
ccatcccgctccctgtaacggaatcactcccctcc

SEQ ID NO: 3264 - DNA, 35 bp, Artificial Sequence
  Synthetic oligonucleotide
cctgcacaccgatacaatgcctaaaaccgcatgtc

SEQ ID NO: 3265 - DNA, 37 bp, Artificial Sequence
  Synthetic oligonucleotide
gcctctgaatcaacccgctagcacttctagacttgga

SEQ ID NO: 3266 - DNA, 37 bp, Artificial Sequence
  Synthetic oligonucleotide
aacgtcaaaaactccgcgccattaaccccaaccggga

SEQ ID NO: 3267 - DNA, 37 bp, Artificial Sequence
  Synthetic oligonucleotide
ttatctacttagcccgcccttactacagtccgcagga

SEQ ID NO: 3268 - DNA, 37 bp, Artificial Sequence
  Synthetic oligonucleotide
ttcacgccgacccgaccctgctttaaagagttcacga

SEQ ID NO: 3269 - DNA, 35 bp, Artificial Sequence
  Synthetic oligonucleotide
agtcactcaccgcgcacgaacgaaacccgctgcac

SEQ ID NO: 3270 - DNA, 38 bp, Artificial Sequence
  Synthetic oligonucleotide
gtccgttcttgtcccgccaaaccatagtaatccgatga

SEQ ID NO: 3271 - DNA, 38 bp, Artificial Sequence
  Synthetic oligonucleotide
actctcaatcctcaggctctgcccttccaaccagatga

SEQ ID NO: 3272 - DNA, 38 bp, Artificial Sequence
  Synthetic oligonucleotide
aacccctattccgtggacactcctatcatgcacgctga

SEQ ID NO: 3273 - DNA, 35 bp, Artificial Sequence
  Synthetic oligonucleotide
accaataaccaactatataccttagatgacttgaa

SEQ ID NO: 3274 - DNA, 37 bp, Artificial Sequence
  Synthetic oligonucleotide
gaccctcagtgcctaccccagtgcaaacaattctgga

SEQ ID NO: 3275 - DNA, 38 bp, Artificial Sequence
  Synthetic oligonucleotide
acaccgtgcccaaactatacggaccacaccgactatga

SEQ ID NO: 3276 - DNA, 36 bp, Artificial Sequence
  Synthetic oligonucleotide
aacctgtcttttcgctatcccacatccgagagacca

SEQ ID NO: 3277 - DNA, 38 bp, Artificial Sequence
  Synthetic oligonucleotide
aaacccgcatctgggaaccggccccaacttggccttga

SEQ ID NO: 3278 - DNA, 37 bp, Artificial Sequence
  Synthetic oligonucleotide
tccgccagtacgcatccaatatagtccggactatgga

SEQ ID NO: 3279 - DNA, 36 bp, Artificial Sequence
  Synthetic oligonucleotide
tgacacgaacgttatgcaatcccgactctggacaaa

SEQ ID NO: 3280 - DNA, 35 bp, Artificial Sequence
  Synthetic oligonucleotide
gcctggcactatactgagtccatccgtacatcccg

SEQ ID NO: 3281 - DNA, 36 bp, Artificial Sequence
  Synthetic oligonucleotide
aatcgtacaggtgtctcccccaccaccccgcgaaaa

SEQ ID NO: 3282 - DNA, 36 bp, Artificial Sequence
  Synthetic oligonucleotide
aacccgcaccccacaactgctacctactggtgcata

SEQ ID NO: 3283 - DNA, 35 bp, Artificial Sequence
  Synthetic oligonucleotide
acaaccccgcaccgttactgccacctctactcacg

SEQ ID NO: 3284 - DNA, 38 bp, Artificial Sequence
  Synthetic oligonucleotide
gaggcattatatcatcccgcatccaatatagaccatga

SEQ ID NO: 3285 - DNA, 37 bp, Artificial Sequence
  Synthetic oligonucleotide
gtcgcgttctacgccccaaccctagctcccttccaga

SEQ ID NO: 3286 - DNA, 36 bp, Artificial Sequence
  Synthetic oligonucleotide
acccaagcaagaatccgactatagctcacctagaca

SEQ ID NO: 3287 - DNA, 37 bp, Artificial Sequence
  Synthetic oligonucleotide
tcttgcacctgcccgcctcagtagactacccgctgga

SEQ ID NO: 3288 - DNA, 38 bp, Artificial Sequence
  Synthetic oligonucleotide
aagttactcctccatctctgcacatggcactagcatga

SEQ ID NO: 3289 - DNA, 36 bp, Artificial Sequence
  Synthetic oligonucleotide
atgcaggcaattaggacatttcactctcgcccgtga

SEQ ID NO: 3290 - DNA, 38 bp, Artificial Sequence
  Synthetic oligonucleotide
acccatattgatccccaccaccaccatcaacgttctga

SEQ ID NO: 3291 - DNA, 37 bp, Artificial Sequence
  Synthetic oligonucleotide
aaagcccagtaactcccggaagattagtaccccccga

SEQ ID NO: 3292 - DNA, 37 bp, Artificial Sequence
  Synthetic oligonucleotide
acttaaggagatcctccccactacacatacccaaaga

SEQ ID NO: 3293 - DNA, 36 bp, Artificial Sequence
  Synthetic oligonucleotide
cccaaatacctattcccgccagtccacgcttatgta

SEQ ID NO: 3294 - DNA, 35 bp, Artificial Sequence
  Synthetic oligonucleotide
aggcacctattacgtccaacccatcccactcggtc

SEQ ID NO: 3295 - DNA, 36 bp, Artificial Sequence
  Synthetic oligonucleotide
acccgccacgaaagcccgactaggtaatacgccgta

SEQ ID NO: 3296 - DNA, 37 bp, Artificial Sequence
  Synthetic oligonucleotide
atcgctccgtttaaatcctaaacccacagccgcttga

SEQ ID NO: 3297 - DNA, 38 bp, Artificial Sequence
  Synthetic oligonucleotide
tgtcatcccacctaaacggggaccatgcatctaaatga

SEQ ID NO: 3298 - DNA, 36 bp, Artificial Sequence
  Synthetic oligonucleotide
gagcactgagtctgacccacaccgcacaggggacta

SEQ ID NO: 3299 - DNA, 38 bp, Artificial Sequence
  Synthetic oligonucleotide
ggtaatccgcctccacacttgcgtgtcccatcatatga

SEQ ID NO: 3300 - DNA, 38 bp, Artificial Sequence
  Synthetic oligonucleotide
tgacaatgacggacccgatactaacccgcagtacttga

SEQ ID NO: 3301 - DNA, 35 bp, Artificial Sequence
  Synthetic oligonucleotide
ggagaaacgtacttgccatccaccccggacatacc

SEQ ID NO: 3302 - DNA, 37 bp, Artificial Sequence
  Synthetic oligonucleotide
acatttgccgcctattcgggcccgcctatcctgtaga

SEQ ID NO: 3303 - DNA, 38 bp, Artificial Sequence
  Synthetic oligonucleotide
acgctcgccgccttttcctagctgtatcccaatgatga

SEQ ID NO: 3304 - DNA, 36 bp, Artificial Sequence
  Synthetic oligonucleotide
cctcgccgcttctgccctacgagtaccccaactaca

SEQ ID NO: 3305 - DNA, 37 bp, Artificial Sequence
  Synthetic oligonucleotide
acccgcccgcttacctgagatatcgagagccccatga

SEQ ID NO: 3306 - DNA, 35 bp, Artificial Sequence
  Synthetic oligonucleotide
ttcccgtccggtactgccctaatcataaagaaacg

SEQ ID NO: 3307 - DNA, 37 bp, Artificial Sequence
  Synthetic oligonucleotide
gtgggtcatcacttcccgcaaatcccgattcctacga

SEQ ID NO: 3308 - DNA, 35 bp, Artificial Sequence
  Synthetic oligonucleotide
acaccgctttgctcggcgacttatcccaaatggta

SEQ ID NO: 3309 - DNA, 37 bp, Artificial Sequence
  Synthetic oligonucleotide
gcgtatcaaaaaacccaccgctaactacaacaaccga

SEQ ID NO: 3310 - DNA, 37 bp, Artificial Sequence
  Synthetic oligonucleotide
ggcccgcctgccaccgaaaacgcgagtacttccaaga

SEQ ID NO: 3311 - DNA, 35 bp, Artificial Sequence
  Synthetic oligonucleotide
gccccagcgcccacctcattccaaatccacgcaat

SEQ ID NO: 3312 - DNA, 37 bp, Artificial Sequence
  Synthetic oligonucleotide
ctcaggctgcaactacccaggttacccatcacttcga

SEQ ID NO: 3313 - DNA, 35 bp, Artificial Sequence
  Synthetic oligonucleotide
acgccgtttctgtgctaccaaccccctgtgctact

SEQ ID NO: 3314 - DNA, 36 bp, Artificial Sequence
  Synthetic oligonucleotide
aaccaccaactctacgcgagttatcctgcccgacga

SEQ ID NO: 3315 - DNA, 36 bp, Artificial Sequence
  Synthetic oligonucleotide
ccctaccacccgaaaacttgaaatcacccgcgtata

SEQ ID NO: 3316 - DNA, 35 bp, Artificial Sequence
  Synthetic oligonucleotide
gacactgcactctgtaccccaacctatgcctctac

SEQ ID NO: 3317 - DNA, 38 bp, Artificial Sequence
  Synthetic oligonucleotide
ctactataatccgctccaccaaaaaatagcctcagtga

SEQ ID NO: 3318 - DNA, 38 bp, Artificial Sequence
  Synthetic oligonucleotide
aggtgtcaactgccactacatccacctgtttccgatga

SEQ ID NO: 3319 - DNA, 38 bp, Artificial Sequence
  Synthetic oligonucleotide
tgtagtattgccttccctcttccgctataaaatgatga

SEQ ID NO: 3320 - DNA, 37 bp, Artificial Sequence
  Synthetic oligonucleotide
gagaacgcccattcgataaccaaaccaacttataaga

SEQ ID NO: 3321 - DNA, 38 bp, Artificial Sequence
  Synthetic oligonucleotide
aggtcatttctactccgattgccagtcaccgatcgtga

SEQ ID NO: 3322 - DNA, 36 bp, Artificial Sequence
  Synthetic oligonucleotide
acttccttggcctggattctacccaataagaactca

SEQ ID NO: 3323 - DNA, 35 bp, Artificial Sequence
  Synthetic oligonucleotide
cttacaaatccttgcctacgacccgaccactggcc

SEQ ID NO: 3324 - DNA, 37 bp, Artificial Sequence
  Synthetic oligonucleotide
gtgcgcctactgctcctacctctgaccacatgtgtga

SEQ ID NO: 3325 - DNA, 35 bp, Artificial Sequence
  Synthetic oligonucleotide
cccctgcctaaaccggttagtgccttgccgctccc

SEQ ID NO: 3326 - DNA, 37 bp, Artificial Sequence
  Synthetic oligonucleotide
actgagtgcatcccacgtactttacaaatccgactga

SEQ ID NO: 3327 - DNA, 35 bp, Artificial Sequence
  Synthetic oligonucleotide
aatccgatcttaccgctatctgataccgagaatta

SEQ ID NO: 3328 - DNA, 38 bp, Artificial Sequence
  Synthetic oligonucleotide
cccaccattacgacctataccccatgttacacgtatga

SEQ ID NO: 3329 - DNA, 35 bp, Artificial Sequence
  Synthetic oligonucleotide
caccgccttagtcccgtaaatactatgctcctctg

SEQ ID NO: 3330 - DNA, 37 bp, Artificial Sequence
  Synthetic oligonucleotide
acagtatacatcacacccctcattttcggagtgccga

SEQ ID NO: 3331 - DNA, 38 bp, Artificial Sequence
  Synthetic oligonucleotide
gcccagtaccggtccaccccgcttccgtactaccctga

SEQ ID NO: 3332 - DNA, 36 bp, Artificial Sequence
  Synthetic oligonucleotide
gaacgtcaccgtatcccccgcatgatcagggcccca

SEQ ID NO: 3333 - DNA, 37 bp, Artificial Sequence
  Synthetic oligonucleotide
gcgcctacgattgacaccgccggaacatacccacaga

SEQ ID NO: 3334 - DNA, 38 bp, Artificial Sequence
  Synthetic oligonucleotide
tattgccccaagatcgacccaacctcaacgcccaatta

SEQ ID NO: 3335 - DNA, 38 bp, Artificial Sequence
  Synthetic oligonucleotide
tccactaccggcgccgacgggccgcatgtaatttctga

SEQ ID NO: 3336 - DNA, 37 bp, Artificial Sequence
  Synthetic oligonucleotide
tcaccaaacgtcatccttcacccgagactgtagggga

SEQ ID NO: 3337 - DNA, 35 bp, Artificial Sequence
  Synthetic oligonucleotide
accgcctctatcggaactttgcttagatactacgc

SEQ ID NO: 3338 - DNA, 37 bp, Artificial Sequence
  Synthetic oligonucleotide
ggacaaaaaacaccttagccccaaatcactaccacta

SEQ ID NO: 3339 - DNA, 37 bp, Artificial Sequence
  Synthetic oligonucleotide
cgcgagccacacctccgcacatttaccctcgggatga

SEQ ID NO: 3340 - DNA, 38 bp, Artificial Sequence
  Synthetic oligonucleotide
ttgtggcttcacccatcaatctcctctgggtctactga

SEQ ID NO: 3341 - DNA, 36 bp, Artificial Sequence
  Synthetic oligonucleotide
ctctgctgactatacccatcataacacgcgagccta

SEQ ID NO: 3342 - DNA, 37 bp, Artificial Sequence
  Synthetic oligonucleotide
taacagcccgacacacccgaactactatggacactga

SEQ ID NO: 3343 - DNA, 38 bp, Artificial Sequence
  Synthetic oligonucleotide
acaccgcatctgccctcggtcaccctacacatcattga

SEQ ID NO: 3344 - DNA, 35 bp, Artificial Sequence
  Synthetic oligonucleotide
actgcctacactacttcgtgcgaacgatagctctt

SEQ ID NO: 3345 - DNA, 35 bp, Artificial Sequence
  Synthetic oligonucleotide
aattccgctctcctgaacgcttggagtcccattca

SEQ ID NO: 3346 - DNA, 35 bp, Artificial Sequence
  Synthetic oligonucleotide
tgctggtcatcacaaccgacgataacgcttaatat

SEQ ID NO: 3347 - DNA, 35 bp, Artificial Sequence
  Synthetic oligonucleotide
gtgacggaacctactactgcactgaaccaccgccc

SEQ ID NO: 3348 - DNA, 35 bp, Artificial Sequence
  Synthetic oligonucleotide
gcccgcgattcacgctccacttaatccgataacct

SEQ ID NO: 3349 - DNA, 37 bp, Artificial Sequence
  Synthetic oligonucleotide
gatatgatcccacttcctagacacctatattacctga

SEQ ID NO: 3350 - DNA, 36 bp, Artificial Sequence
  Synthetic oligonucleotide
cttatctgctgtccctttcgcttggatcacgattaa

SEQ ID NO: 3351 - DNA, 37 bp, Artificial Sequence
  Synthetic oligonucleotide
aatcaactctcatgccgcccatcagtccacgttatga

SEQ ID NO: 3352 - DNA, 36 bp, Artificial Sequence
  Synthetic oligonucleotide
cgcttactcgtactcatcatcacgtgacattcacta

SEQ ID NO: 3353 - DNA, 36 bp, Artificial Sequence
  Synthetic oligonucleotide
tccctatccccccgccagtaaaacccacatgacgga

SEQ ID NO: 3354 - DNA, 36 bp, Artificial Sequence
  Synthetic oligonucleotide
actccatattcacgataacccacagatccgttaaaa

SEQ ID NO: 3355 - DNA, 37 bp, Artificial Sequence
  Synthetic oligonucleotide
tccatcccgactaatttttagacctttgctacacaga

SEQ ID NO: 3356 - DNA, 37 bp, Artificial Sequence
  Synthetic oligonucleotide
gcgttcgttctatactttctaacgttctttacacaga

SEQ ID NO: 3357 - DNA, 37 bp, Artificial Sequence
  Synthetic oligonucleotide
taccggataacaacgccaattttcattaatttcaaga

SEQ ID NO: 3358 - DNA, 37 bp, Artificial Sequence
  Synthetic oligonucleotide
ggactacacgtgagcgcttattctttgactttacaga

SEQ ID NO: 3359 - DNA, 35 bp, Artificial Sequence
  Synthetic oligonucleotide
atcacgggagtgatagtctgggccctgaaactact

SEQ ID NO: 3360 - DNA, 35 bp, Artificial Sequence
  Synthetic oligonucleotide
aaatcccatcgagcccttaacccagaccaactcaa

SEQ ID NO: 3361 - DNA, 35 bp, Artificial Sequence
  Synthetic oligonucleotide
atcatcccggcttttgagtaaaccagcttttcacc

SEQ ID NO: 3362 - DNA, 35 bp, Artificial Sequence
  Synthetic oligonucleotide
gagtacttgactctggtatattttttctccccatt

SEQ ID NO: 3363 - DNA, 35 bp, Artificial Sequence
  Synthetic oligonucleotide
actttacacccgcgaacaatattacctccccgaac

SEQ ID NO: 3364 - DNA, 37 bp, Artificial Sequence
  Synthetic oligonucleotide
aacctggccattacactttccttttgagttctctaga

SEQ ID NO: 3365 - DNA, 36 bp, Artificial Sequence
  Synthetic oligonucleotide
gagtaggcctctgcactcccttctcgagatccgtaa

SEQ ID NO: 3366 - DNA, 35 bp, Artificial Sequence
  Synthetic oligonucleotide
tcttggaggacttttttttgacggttttttgtggt

SEQ ID NO: 3367 - DNA, 37 bp, Artificial Sequence
  Synthetic oligonucleotide
acgcacatctcattccgaataccttacgaataacaga

SEQ ID NO: 3368 - DNA, 37 bp, Artificial Sequence
  Synthetic oligonucleotide
gacctatacatatccgcgcacataaactcgaactaga

SEQ ID NO: 3369 - DNA, 35 bp, Artificial Sequence
  Synthetic oligonucleotide
ggaccgtttttgttttattgatgccgattgaccgc

SEQ ID NO: 3370 - DNA, 38 bp, Artificial Sequence
  Synthetic oligonucleotide
atcttttgcctgatcgcttcgaaattcgttccgcctga

SEQ ID NO: 3371 - DNA, 37 bp, Artificial Sequence
  Synthetic oligonucleotide
ttttgcatatacccttggttcttgttccatccgagga

SEQ ID NO: 3372 - DNA, 35 bp, Artificial Sequence
  Synthetic oligonucleotide
atttttgcaacatttgaaatttgggcattgggaac

SEQ ID NO: 3373 - DNA, 36 bp, Artificial Sequence
  Synthetic oligonucleotide
gagcacttaatttgtttgtatactgatggttttggt

SEQ ID NO: 3374 - DNA, 38 bp, Artificial Sequence
  Synthetic oligonucleotide
cgtagtaccggtctacttcattgcccacttgtatttga

SEQ ID NO: 3375 - DNA, 38 bp, Artificial Sequence
  Synthetic oligonucleotide
atgtggtggcctgaattgagtcctttttgttttgctga

SEQ ID NO: 3376 - DNA, 37 bp, Artificial Sequence
  Synthetic oligonucleotide
acttaccctggtgcactgaaagtgaacatttgtttga

SEQ ID NO: 3377 - DNA, 37 bp, Artificial Sequence
  Synthetic oligonucleotide
ttgcaactataggttgcattggtttttcgatacttga

SEQ ID NO: 3378 - DNA, 35 bp, Artificial Sequence
  Synthetic oligonucleotide
gacgctactaagtgtcgtgggattttttgctctct

SEQ ID NO: 3379 - DNA, 35 bp, Artificial Sequence
  Synthetic oligonucleotide
gcctggattactttgtgagagtttttggggtttgc

SEQ ID NO: 3380 - DNA, 35 bp, Artificial Sequence
  Synthetic oligonucleotide
ggtatagcggtcttgcaaacttgcaaaatcctctt

SEQ ID NO: 3381 - DNA, 38 bp, Artificial Sequence
  Synthetic oligonucleotide
gagtagttccggtcgtttacgggcttttgtttatttga

SEQ ID NO: 3382 - DNA, 38 bp, Artificial Sequence
  Synthetic oligonucleotide
tgggactttgccgcgaagctcttttctgttatctatga

SEQ ID NO: 3383 - DNA, 35 bp, Artificial Sequence
  Synthetic oligonucleotide
gattcgtagcctttaagttttggattgttgcctct

SEQ ID NO: 3384 - DNA, 35 bp, Artificial Sequence
  Synthetic oligonucleotide
ggggccatttagtatgttgtttctttttacgatgc

SEQ ID NO: 3385 - DNA, 38 bp, Artificial Sequence
  Synthetic oligonucleotide
aaatcgaaatcgggccttttgaaacattgccttagtga

SEQ ID NO: 3386 - DNA, 38 bp, Artificial Sequence
  Synthetic oligonucleotide
ggggctaatcgttcgaatttcgctgtgccatttcttga

SEQ ID NO: 3387 - DNA, 37 bp, Artificial Sequence
  Synthetic oligonucleotide
tttcggatattaactttgcgacctcggggtctatcga

SEQ ID NO: 3388 - DNA, 38 bp, Artificial Sequence
  Synthetic oligonucleotide
tgcattctctcggttagttctgtctgtttttgttttga

SEQ ID NO: 3389 - DNA, 37 bp, Artificial Sequence
  Synthetic oligonucleotide
ttcactctacctctctcttgctctgggcttatagtga

SEQ ID NO: 3390 - DNA, 38 bp, Artificial Sequence
  Synthetic oligonucleotide
ggtttcgaattgttagttcctttagtatgatgccttga

SEQ ID NO: 3391 - DNA, 38 bp, Artificial Sequence
  Synthetic oligonucleotide
gaattgccttagttggaattgatgttatttgtttttga

SEQ ID NO: 3392 - DNA, 38 bp, Artificial Sequence
  Synthetic oligonucleotide
atttcctgcgtgggttcgcctcgaattgcccatcttga

SEQ ID NO: 3393 - DNA, 38 bp, Artificial Sequence
  Synthetic oligonucleotide
gcggagaagctttgtatgttttccaccttggttattga

SEQ ID NO: 3394 - DNA, 35 bp, Artificial Sequence
  Synthetic oligonucleotide
gaaccagctgttgattttaccgccttgcccttttc

SEQ ID NO: 3395 - DNA, 37 bp, Artificial Sequence
  Synthetic oligonucleotide
attttgcccgtgattcttattttgtcgctgattgaga

SEQ ID NO: 3396 - DNA, 37 bp, Artificial Sequence
  Synthetic oligonucleotide
tgcccccggtgtttgctttacctgtaagttttcgtga

SEQ ID NO: 3397 - DNA, 36 bp, Artificial Sequence
  Synthetic oligonucleotide
gctcaccgcgaatattttgcttgggatttctgggga

SEQ ID NO: 3398 - DNA, 35 bp, Artificial Sequence
  Synthetic oligonucleotide
agccttaatgaatgaaccatcaacgaattgctctt

SEQ ID NO: 3399 - DNA, 38 bp, Artificial Sequence
  Synthetic oligonucleotide
gtgacgattgcgaaattgacttctcctcttctgtatga

SEQ ID NO: 3400 - DNA, 38 bp, Artificial Sequence
  Synthetic oligonucleotide
gagttgaatgttacccctctgcacaatattttagttga

SEQ ID NO: 3401 - DNA, 38 bp, Artificial Sequence
  Synthetic oligonucleotide
gcgcaccttggggtttagtcatattacttggttcttga

SEQ ID NO: 3402 - DNA, 38 bp, Artificial Sequence
  Synthetic oligonucleotide
ttttggcctaactccgggtttcgctttcctgcctgtga

SEQ ID NO: 3403 - DNA, 36 bp, Artificial Sequence
  Synthetic oligonucleotide
gagtgaggtttgatttgcctattttcagaggggttc

SEQ ID NO: 3404 - DNA, 38 bp, Artificial Sequence
  Synthetic oligonucleotide
gacggtggtcttggggggggttttgttttccagtatga

SEQ ID NO: 3405 - DNA, 37 bp, Artificial Sequence
  Synthetic oligonucleotide
ttcaggtaggagcatttggtggtcttcgctttcttga

SEQ ID NO: 3406 - DNA, 35 bp, Artificial Sequence
  Synthetic oligonucleotide
tcgggtaggttatccctgtatcaccttttttttgc

SEQ ID NO: 3407 - DNA, 38 bp, Artificial Sequence
  Synthetic oligonucleotide
tcactcatgcacttttgagctttgttgctgaattttga

SEQ ID NO: 3408 - DNA, 38 bp, Artificial Sequence
  Synthetic oligonucleotide
acacgcgctttggttattgtgcttttgcttcaccgtga

SEQ ID NO: 3409 - DNA, 35 bp, Artificial Sequence
  Synthetic oligonucleotide
ttatatctggttgacttttttttgcgggttgcacc

SEQ ID NO: 3410 - DNA, 38 bp, Artificial Sequence
  Synthetic oligonucleotide
ggttgcttatgggtcgtaccatttgcatgattctttga

SEQ ID NO: 3411 - DNA, 37 bp, Artificial Sequence
  Synthetic oligonucleotide
tgcccgtccttggttttcacgtgatttgattgtgcga

SEQ ID NO: 3412 - DNA, 37 bp, Artificial Sequence
  Synthetic oligonucleotide
tgcttctgtaagcggagctattaataggtatctttga

SEQ ID NO: 3413 - DNA, 38 bp, Artificial Sequence
  Synthetic oligonucleotide
ttttccatggttgtttttgcctcatcctctcctagtga

SEQ ID NO: 3414 - DNA, 38 bp, Artificial Sequence
  Synthetic oligonucleotide
agcaccccgatcgttaggggttctgttaaattctttga

SEQ ID NO: 3415 - DNA, 36 bp, Artificial Sequence
  Synthetic oligonucleotide
atttcttgccgttgccctgtttttttgtttatgaaa

SEQ ID NO: 3416 - DNA, 38 bp, Artificial Sequence
  Synthetic oligonucleotide
ttatgcaattttcttccgcttggaccataacaggttga

SEQ ID NO: 3417 - DNA, 38 bp, Artificial Sequence
  Synthetic oligonucleotide
tctttggtccgtgtaaataattttgcctgcttttttga

SEQ ID NO: 3418 - DNA, 35 bp, Artificial Sequence
  Synthetic oligonucleotide
aacgcgtactgagcaataaagcttttgccgtgttt

SEQ ID NO: 3419 - DNA, 38 bp, Artificial Sequence
  Synthetic oligonucleotide
agtgagtcgacgacgacgtttctcgatatcccccttga

SEQ ID NO: 3420 - DNA, 37 bp, Artificial Sequence
  Synthetic oligonucleotide
tttgttccattttttatgcattgttttcagtacgtga

SEQ ID NO: 3421 - DNA, 38 bp, Artificial Sequence
  Synthetic oligonucleotide
ttttagctctcatttggttgaggattattctgctttga

SEQ ID NO: 3422 - DNA, 37 bp, Artificial Sequence
  Synthetic oligonucleotide
ttccttagggggtttgacctcatggtccttcgtgtga

SEQ ID NO: 3423 - DNA, 38 bp, Artificial Sequence
  Synthetic oligonucleotide
ttacaatgattttcgaaccgggggttcgagctatttga

SEQ ID NO: 3424 - DNA, 35 bp, Artificial Sequence
  Synthetic oligonucleotide
gttcgcttggccgtggacttcctatattaaatttg

SEQ ID NO: 3425 - DNA, 35 bp, Artificial Sequence
  Synthetic oligonucleotide
gcccttttgctttttgagggatttaacatgcttgg

SEQ ID NO: 3426 - DNA, 35 bp, Artificial Sequence
  Synthetic oligonucleotide
ggaaatagaattgtaggattctctagtgcttttct

SEQ ID NO: 3427 - DNA, 36 bp, Artificial Sequence
  Synthetic oligonucleotide
gaccgtgttcggaccggatgtccgacttcttcttga

SEQ ID NO: 3428 - DNA, 38 bp, Artificial Sequence
  Synthetic oligonucleotide
gagtaatcgtaaattttgccccgctggctctggcttga

SEQ ID NO: 3429 - DNA, 35 bp, Artificial Sequence
  Synthetic oligonucleotide
ttactccttgacgattgtgagttctctttagaagc

SEQ ID NO: 3430 - DNA, 38 bp, Artificial Sequence
  Synthetic oligonucleotide
gcacgggaaggtactgctcgtcatattaacttggttga

SEQ ID NO: 3431 - DNA, 37 bp, Artificial Sequence
  Synthetic oligonucleotide
tccgtagatccgccccaagcatgggtttttagtttga

SEQ ID NO: 3432 - DNA, 36 bp, Artificial Sequence
  Synthetic oligonucleotide
ttctatgcaaagctccaacggtggagtggttttcta

SEQ ID NO: 3433 - DNA, 38 bp, Artificial Sequence
  Synthetic oligonucleotide
tctttatctagcttggtgggctatgcaagcccatttga

SEQ ID NO: 3434 - DNA, 38 bp, Artificial Sequence
  Synthetic oligonucleotide
atcccgttttttacctttgtgagcattatgccgcttga

SEQ ID NO: 3435 - DNA, 37 bp, Artificial Sequence
  Synthetic oligonucleotide
gttttcgcgagttatttccgtaatctgctcttagtga

SEQ ID NO: 3436 - DNA, 35 bp, Artificial Sequence
  Synthetic oligonucleotide
aaattaaacctttgcgcgttttggtgccctttgaa

SEQ ID NO: 3437 - DNA, 36 bp, Artificial Sequence
  Synthetic oligonucleotide
ttttgccgttttccatttatccgtgtaaatgattca

SEQ ID NO: 3438 - DNA, 36 bp, Artificial Sequence
  Synthetic oligonucleotide
gtggtaccatttgactccaacggtgattattgctta

SEQ ID NO: 3439 - DNA, 38 bp, Artificial Sequence
  Synthetic oligonucleotide
gcggtcgttttgacttgtcttcggtctcattggattga

SEQ ID NO: 3440 - DNA, 36 bp, Artificial Sequence
  Synthetic oligonucleotide
gagtggaacgttagctttactttggtgggatcttga

SEQ ID NO: 3441 - DNA, 37 bp, Artificial Sequence
  Synthetic oligonucleotide
acggttcgcactgttcaacgtggtttctccttgggga

SEQ ID NO: 3442 - DNA, 35 bp, Artificial Sequence
  Synthetic oligonucleotide
attgctgtgcctgactatttgaacctttgaccgta

SEQ ID NO: 3443 - DNA, 36 bp, Artificial Sequence
  Synthetic oligonucleotide
attgtttttatttttgccatagggtgtgccttagta

SEQ ID NO: 3444 - DNA, 37 bp, Artificial Sequence
  Synthetic oligonucleotide
acgtcaaccatatgattagctttgttgcccttggaga

SEQ ID NO: 3445 - DNA, 38 bp, Artificial Sequence
  Synthetic oligonucleotide
atttcaaattgctttgctggacggtgctccttacttga

SEQ ID NO: 3446 - DNA, 35 bp, Artificial Sequence
  Synthetic oligonucleotide
tttgcatgaagccattgaccggattggattcttta

SEQ ID NO: 3447 - DNA, 38 bp, Artificial Sequence
  Synthetic oligonucleotide
tcctggagcttctacgtaaatttgatgccttttgatga

SEQ ID NO: 3448 - DNA, 37 bp, Artificial Sequence
  Synthetic oligonucleotide
acagaggtacgttgattctcctcccttgttagcccta

SEQ ID NO: 3449 - DNA, 38 bp, Artificial Sequence
  Synthetic oligonucleotide
attgcatggggattctgcctatgttggttctgttttga

SEQ ID NO: 3450 - DNA, 35 bp, Artificial Sequence
  Synthetic oligonucleotide
gccacgtattcatcacatggggggatgtccttgtt

SEQ ID NO: 3451 - DNA, 36 bp, Artificial Sequence
  Synthetic oligonucleotide
aatgcatcgatgagccattgacttgtttggtttgta

SEQ ID NO: 3452 - DNA, 35 bp, Artificial Sequence
  Synthetic oligonucleotide
attttgatcacatgtgttgtgtaccatttgctatt

SEQ ID NO: 3453 - DNA, 35 bp, Artificial Sequence
  Synthetic oligonucleotide
tgtttgttgcccgctcggcgcagttaccctttgct

SEQ ID NO: 3454 - DNA, 38 bp, Artificial Sequence
  Synthetic oligonucleotide
tgccacccgtgtttggggccctagtgtttttttcgtga

SEQ ID NO: 3455 - DNA, 38 bp, Artificial Sequence
  Synthetic oligonucleotide
cgtcagtaattgcagcatgacaatttcctgcttgttga

SEQ ID NO: 3456 - DNA, 38 bp, Artificial Sequence
  Synthetic oligonucleotide
tgttccctgattttgccactggacctagtaggatttga

SEQ ID NO: 3457 - DNA, 35 bp, Artificial Sequence
  Synthetic oligonucleotide
catgccgaaacgatggtttggatcgtgctcctctg

SEQ ID NO: 3458 - DNA, 38 bp, Artificial Sequence
  Synthetic oligonucleotide
ttcgctatccgggtgatcgctgtggaggtatttcttga

SEQ ID NO: 3459 - DNA, 38 bp, Artificial Sequence
  Synthetic oligonucleotide
tctaattttttgcgtggttctggcctatcaaagtttga

SEQ ID NO: 3460 - DNA, 38 bp, Artificial Sequence
  Synthetic oligonucleotide
gcttccttctgggtgacgggtgatccccgtgcttgtga

SEQ ID NO: 3461 - DNA, 36 bp, Artificial Sequence
  Synthetic oligonucleotide
gagtacactcaattttagtttggtgcatgccctgca

SEQ ID NO: 3462 - DNA, 37 bp, Artificial Sequence
  Synthetic oligonucleotide
ttgctctgttcttaccgcccagtgaacgcgtgttcga

SEQ ID NO: 3463 - DNA, 38 bp, Artificial Sequence
  Synthetic oligonucleotide
acgtgcacaatgttggattgtttttgccctttgtatga

SEQ ID NO: 3464 - DNA, 37 bp, Artificial Sequence
  Synthetic oligonucleotide
tatttgcccgattgtgaaggtgtagcccttgatctga

SEQ ID NO: 3465 - DNA, 38 bp, Artificial Sequence
  Synthetic oligonucleotide
tcgacttgccagggacttttgcatccgccttgatatga

SEQ ID NO: 3466 - DNA, 35 bp, Artificial Sequence
  Synthetic oligonucleotide
gcagggccgcctgttaaggttcctaatttgccgtt

SEQ ID NO: 3467 - DNA, 37 bp, Artificial Sequence
  Synthetic oligonucleotide
ccgttggtgggacacccctgatcttgcctcttattga

SEQ ID NO: 3468 - DNA, 35 bp, Artificial Sequence
  Synthetic oligonucleotide
acccgatagctttgaggtttgtttttctgtgcctt

SEQ ID NO: 3469 - DNA, 36 bp, Artificial Sequence
  Synthetic oligonucleotide
tctagcgtttgcttaccgcacactttctgtgaaaaa

SEQ ID NO: 3470 - DNA, 38 bp, Artificial Sequence
  Synthetic oligonucleotide
gagctttagaggcgcttgagggcgactttcctgtttga

SEQ ID NO: 3471 - DNA, 35 bp, Artificial Sequence
  Synthetic oligonucleotide
aatagaatgatttgtccggtcccgtatttcttgct

SEQ ID NO: 3472 - DNA, 37 bp, Artificial Sequence
  Synthetic oligonucleotide
ttcgtaacgttgaccgtgttgtttcgtttatgcctga

SEQ ID NO: 3473 - DNA, 38 bp, Artificial Sequence
  Synthetic oligonucleotide
agacccgtgaggatacatttttgtttaatttggcttga

SEQ ID NO: 3474 - DNA, 37 bp, Artificial Sequence
  Synthetic oligonucleotide
ttaacgcccaagctcggggaccgtgttctgtttttga

SEQ ID NO: 3475 - DNA, 38 bp, Artificial Sequence
  Synthetic oligonucleotide
gcatggttttgttcgaatatttccgaatcacgatttga

SEQ ID NO: 3476 - DNA, 37 bp, Artificial Sequence
  Synthetic oligonucleotide
ttgcaaatggaacctatgccctgttttaatgacttga

SEQ ID NO: 3477 - DNA, 37 bp, Artificial Sequence
  Synthetic oligonucleotide
attttatcggttttgtacctgatttgctttgattgga

SEQ ID NO: 3478 - DNA, 35 bp, Artificial Sequence
  Synthetic oligonucleotide
agtggacgcgttacctcacttttgcttgaatttgc

SEQ ID NO: 3479 - DNA, 35 bp, Artificial Sequence
  Synthetic oligonucleotide
atgtttgttgttgttcctccccttatgacttaatc

SEQ ID NO: 3480 - DNA, 38 bp, Artificial Sequence
  Synthetic oligonucleotide
tttgcctgtgaggtaaatctcatagtatccgtttttga

SEQ ID NO: 3481 - DNA, 35 bp, Artificial Sequence
  Synthetic oligonucleotide
ttttgcttcgtgtggtggttaactttcgcgcttac

SEQ ID NO: 3482 - DNA, 35 bp, Artificial Sequence
  Synthetic oligonucleotide
tgatcaatctggtccctcttttttggagtcttcac

SEQ ID NO: 3483 - DNA, 37 bp, Artificial Sequence
  Synthetic oligonucleotide
ttagcattcgccttccaaacccacgggtttgccttga

SEQ ID NO: 3484 - DNA, 37 bp, Artificial Sequence
  Synthetic oligonucleotide
acacggttgtccctggattagctctttgatttggtga

SEQ ID NO: 3485 - DNA, 37 bp, Artificial Sequence
  Synthetic oligonucleotide
ttcactcgaggtttcggttttataaatttctgtacga

SEQ ID NO: 3486 - DNA, 38 bp, Artificial Sequence
  Synthetic oligonucleotide
cccaacttggtttctgtttatgatctattcggtgatga

SEQ ID NO: 3487 - DNA, 36 bp, Artificial Sequence
  Synthetic oligonucleotide
attgcccttgtttggtgtgtgtatttttctcatgta

SEQ ID NO: 3488 - DNA, 37 bp, Artificial Sequence
  Synthetic oligonucleotide
actttctgggtttacttctggtggtttccatgtatga

SEQ ID NO: 3489 - DNA, 35 bp, Artificial Sequence
  Synthetic oligonucleotide
ttttgaccctgcgaaccgaatgaccgtaatcgtta

SEQ ID NO: 3490 - DNA, 38 bp, Artificial Sequence
  Synthetic oligonucleotide
gattcttcaactcgggttgacacctgttcgccttttga

SEQ ID NO: 3491 - DNA, 38 bp, Artificial Sequence
  Synthetic oligonucleotide
ggtggtcctttgttgacggaatttatttggttctctga

SEQ ID NO: 3492 - DNA, 37 bp, Artificial Sequence
  Synthetic oligonucleotide
tatttcttccgtgttttccatactgtgatgatggaga

SEQ ID NO: 3493 - DNA, 35 bp, Artificial Sequence
  Synthetic oligonucleotide
tttggctctttagcacacgggtttctagttccgtt

SEQ ID NO: 3494 - DNA, 38 bp, Artificial Sequence
  Synthetic oligonucleotide
ggaagtactgtactccgaatcggatcggatttttttga

SEQ ID NO: 3495 - DNA, 35 bp, Artificial Sequence
  Synthetic oligonucleotide
aataggaacttgccctcgcttttaattgttgcctt

SEQ ID NO: 3496 - DNA, 38 bp, Artificial Sequence
  Synthetic oligonucleotide
ttttctgacttttggggtggtctaaatatacttggtga

SEQ ID NO: 3497 - DNA, 35 bp, Artificial Sequence
  Synthetic oligonucleotide
aatttgcctcgtttttccgggtcctgaagggatct

SEQ ID NO: 3498 - DNA, 35 bp, Artificial Sequence
  Synthetic oligonucleotide
tcgacttaatgtcttattcggagccctacttgaaa

SEQ ID NO: 3499 - DNA, 38 bp, Artificial Sequence
  Synthetic oligonucleotide
gccgctaacgctgaaccgacgttgttaaatccgtgtga

SEQ ID NO: 3500 - DNA, 38 bp, Artificial Sequence
  Synthetic oligonucleotide
ttccttgatggggttcgcctttttctgccaactattga

SEQ ID NO: 3501 - DNA, 35 bp, Artificial Sequence
  Synthetic oligonucleotide
gcaccgaagagtacgtttcgaccttggattattgc

SEQ ID NO: 3502 - DNA, 35 bp, Artificial Sequence
  Synthetic oligonucleotide
tactgtcctattccccgtagttttttgtacctgga

SEQ ID NO: 3503 - DNA, 38 bp, Artificial Sequence
  Synthetic oligonucleotide
ttgcgaacttggttagcccgcctagagggttgatttga

SEQ ID NO: 3504 - DNA, 36 bp, Artificial Sequence
  Synthetic oligonucleotide
gaatgtcaccttgtggtagtgggtttctggttttga

SEQ ID NO: 3505 - DNA, 37 bp, Artificial Sequence
  Synthetic oligonucleotide
tgaaccacttagatccgttccttaaccctgcttatga

SEQ ID NO: 3506 - DNA, 35 bp, Artificial Sequence
  Synthetic oligonucleotide
ttaatcccctttcttctcgcttatgaagaaactta

SEQ ID NO: 3507 - DNA, 37 bp, Artificial Sequence
  Synthetic oligonucleotide
gagtgcgggttgatcacttggtggggtatcttcttga

SEQ ID NO: 3508 - DNA, 35 bp, Artificial Sequence
  Synthetic oligonucleotide
tcaacacgctgaccatatgttacttgtgccctgct

SEQ ID NO: 3509 - DNA, 36 bp, Artificial Sequence
  Synthetic oligonucleotide
aattctctcagtttcgctcgtagcgagtttttgcca

SEQ ID NO: 3510 - DNA, 38 bp, Artificial Sequence
  Synthetic oligonucleotide
aagttctttgccctttctttgctacctgaataatatga

SEQ ID NO: 3511 - DNA, 38 bp, Artificial Sequence
  Synthetic oligonucleotide
tgcagtatggacacagtgggtattttgttgtttggtga

SEQ ID NO: 3512 - DNA, 38 bp, Artificial Sequence
  Synthetic oligonucleotide
ttggagctgtactcccgctttatatctgtatctcgtga

SEQ ID NO: 3513 - DNA, 35 bp, Artificial Sequence
  Synthetic oligonucleotide
actttaacgaaactttgccgtatttcgtttgattc

SEQ ID NO: 3514 - DNA, 38 bp, Artificial Sequence
  Synthetic oligonucleotide
acattgtaaatcccaattctgatggtttgtttgtttga

SEQ ID NO: 3515 - DNA, 38 bp, Artificial Sequence
  Synthetic oligonucleotide
atccggtttgatcttcggagatgatatgaaatttgtga

SEQ ID NO: 3516 - DNA, 35 bp, Artificial Sequence
  Synthetic oligonucleotide
acggcgtgagccatggaaaagtaaattttgcccga

SEQ ID NO: 3517 - DNA, 35 bp, Artificial Sequence
  Synthetic oligonucleotide
atccaaaacataacctttgccgggggtattctctt

SEQ ID NO: 3518 - DNA, 38 bp, Artificial Sequence
  Synthetic oligonucleotide
ttgctcggtcaaatattgttcgttgtttcaacccgtga

SEQ ID NO: 3519 - DNA, 38 bp, Artificial Sequence
  Synthetic oligonucleotide
attgcatatccgttttctcaactgtaccgcttgggtga

SEQ ID NO: 3520 - DNA, 35 bp, Artificial Sequence
  Synthetic oligonucleotide
acctggaccggtgtcgaaccggaaatctgccctct

SEQ ID NO: 3521 - DNA, 38 bp, Artificial Sequence
  Synthetic oligonucleotide
catgcagtgggtaactaaacgcttctgtatactggtga

SEQ ID NO: 3522 - DNA, 35 bp, Artificial Sequence
  Synthetic oligonucleotide
tcatgaagcttggcttctgaaatccacacgatttt

SEQ ID NO: 3523 - DNA, 35 bp, Artificial Sequence
  Synthetic oligonucleotide
gcacccggttttgtttaactgcttgtaggaccacc

SEQ ID NO: 3524 - DNA, 35 bp, Artificial Sequence
  Synthetic oligonucleotide
ttttcgccgtgaggaataccgttgggtcctttgtt

SEQ ID NO: 3525 - DNA, 38 bp, Artificial Sequence
  Synthetic oligonucleotide
tcgttaaattgggcttgcctgtgccttttttcccgtga

SEQ ID NO: 3526 - DNA, 38 bp, Artificial Sequence
  Synthetic oligonucleotide
attgggggtcaccttgggtttggatgttttttgtttga

SEQ ID NO: 3527 - DNA, 37 bp, Artificial Sequence
  Synthetic oligonucleotide
ttgacgaaattacccggtattgtgcttataaattgga

SEQ ID NO: 3528 - DNA, 37 bp, Artificial Sequence
  Synthetic oligonucleotide
tgcgattgattccttccgtgccgttttgaaactatga

SEQ ID NO: 3529 - DNA, 36 bp, Artificial Sequence
  Synthetic oligonucleotide
tctgtgccaataactctaaatgccgcttagtttgaa

SEQ ID NO: 3530 - DNA, 38 bp, Artificial Sequence
  Synthetic oligonucleotide
atggtgatcggtggtttgttactctgtccgtttcttga

SEQ ID NO: 3531 - DNA, 35 bp, Artificial Sequence
  Synthetic oligonucleotide
gcccggttacgtaccttggggtgtttgtctcttgc

SEQ ID NO: 3532 - DNA, 35 bp, Artificial Sequence
  Synthetic oligonucleotide
tgcgagtcctctgaatctgatcctaaacttcttgc

SEQ ID NO: 3533 - DNA, 38 bp, Artificial Sequence
  Synthetic oligonucleotide
actccggccttcttctgtatcggtttttttgctgttga

SEQ ID NO: 3534 - DNA, 35 bp, Artificial Sequence
  Synthetic oligonucleotide
tcgactcttgtgccatggtttccttatctggtatt

SEQ ID NO: 3535 - DNA, 36 bp, Artificial Sequence
  Synthetic oligonucleotide
ttcgatctgtgcgaacagattttgttttgccctgga

SEQ ID NO: 3536 - DNA, 35 bp, Artificial Sequence
  Synthetic oligonucleotide
ttcgtcgtttaaacacatttgtccgctatgcctta

SEQ ID NO: 3537 - DNA, 37 bp, Artificial Sequence
  Synthetic oligonucleotide
atggaaggggttccatttcctttatttgggttttcga

SEQ ID NO: 3538 - DNA, 37 bp, Artificial Sequence
  Synthetic oligonucleotide
tgcttgggtgcaatgcgaacgcatattaatttgttga

SEQ ID NO: 3539 - DNA, 35 bp, Artificial Sequence
  Synthetic oligonucleotide
gcattgtgtaacttcggtttttttggaattttcgc

SEQ ID NO: 3540 - DNA, 36 bp, Artificial Sequence
  Synthetic oligonucleotide
gggtccaaacggcttggccattttctctatttctga

SEQ ID NO: 3541 - DNA, 38 bp, Artificial Sequence
  Synthetic oligonucleotide
gataatcttgctccgtagaaacatacttactctggtga

SEQ ID NO: 3542 - DNA, 35 bp, Artificial Sequence
  Synthetic oligonucleotide
atcgagtgtctcccgttttatctttgattgtttgc

SEQ ID NO: 3543 - DNA, 36 bp, Artificial Sequence
  Synthetic oligonucleotide
tctctgtattcgtttttctgatatttggttgtagaa

SEQ ID NO: 3544 - DNA, 36 bp, Artificial Sequence
  Synthetic oligonucleotide
tctcctgggtcccgttcggttatattatgcttgtga

SEQ ID NO: 3545 - DNA, 38 bp, Artificial Sequence
  Synthetic oligonucleotide
accgctcccttttgttcgggcttggccaatttccttga

SEQ ID NO: 3546 - DNA, 35 bp, Artificial Sequence
  Synthetic oligonucleotide
aggccaattttatagcggtgactcacttttgccct

SEQ ID NO: 3547 - DNA, 38 bp, Artificial Sequence
  Synthetic oligonucleotide
gggtgaggtaccttctccgtgtgattctccgtttttga

SEQ ID NO: 3548 - DNA, 38 bp, Artificial Sequence
  Synthetic oligonucleotide
gaaacgtgattataccgacttgttgcttacgaatttga

SEQ ID NO: 3549 - DNA, 36 bp, Artificial Sequence
  Synthetic oligonucleotide
ttgcctgagagatgccgctttgttcttcgtaatcta

SEQ ID NO: 3550 - DNA, 38 bp, Artificial Sequence
  Synthetic oligonucleotide
ttctctgacccggtttttttacatatgtgacgttttga

SEQ ID NO: 3551 - DNA, 38 bp, Artificial Sequence
  Synthetic oligonucleotide
tgcacctcgtaaaaaaactcgggtctggaatttcgtga

SEQ ID NO: 3552 - DNA, 38 bp, Artificial Sequence
  Synthetic oligonucleotide
cataaactctccttcctgcactcttccggattacttga

SEQ ID NO: 3553 - DNA, 35 bp, Artificial Sequence
  Synthetic oligonucleotide
acccgggtttgcatactgttcttctgtccttatga

SEQ ID NO: 3554 - DNA, 38 bp, Artificial Sequence
  Synthetic oligonucleotide
tctgaaactagcatgagccttactgacctgatgtttga

SEQ ID NO: 3555 - DNA, 35 bp, Artificial Sequence
  Synthetic oligonucleotide
tattgcccgccactttctgaatgatttgatctgct

SEQ ID NO: 3556 - DNA, 37 bp, Artificial Sequence
  Synthetic oligonucleotide
gacgcaccaaattatgcaatacaaattctgcccttga

SEQ ID NO: 3557 - DNA, 35 bp, Artificial Sequence
  Synthetic oligonucleotide
gggttacgttattctccggtaccttgggtttaaaa

SEQ ID NO: 3558 - DNA, 35 bp, Artificial Sequence
  Synthetic oligonucleotide
gacaactcccgtgaggagtttctgattttatgttt

SEQ ID NO: 3559 - DNA, 38 bp, Artificial Sequence
  Synthetic oligonucleotide
ttactagccggtggatctgcccacgttcgtttttttga

SEQ ID NO: 3560 - DNA, 38 bp, Artificial Sequence
  Synthetic oligonucleotide
gcacaaattgcccggtataattgttatacgctatgtga

SEQ ID NO: 3561 - DNA, 37 bp, Artificial Sequence
  Synthetic oligonucleotide
taccgaggtcgagggatttttgtttgtccttatgtga

SEQ ID NO: 3562 - DNA, 36 bp, Artificial Sequence
  Synthetic oligonucleotide
aaaattgccggcgccgtagccttgttttcatcttta

SEQ ID NO: 3563 - DNA, 38 bp, Artificial Sequence
  Synthetic oligonucleotide
tccgcgggccgtaatttggttagattttctgtttgtga

SEQ ID NO: 3564 - DNA, 37 bp, Artificial Sequence
  Synthetic oligonucleotide
ttgcctcgctttgaccagtgttcctgtttctccttga

SEQ ID NO: 3565 - DNA, 38 bp, Artificial Sequence
  Synthetic oligonucleotide
gggcggaccgcctggggttttgaaccttacaatcttga

SEQ ID NO: 3566 - DNA, 38 bp, Artificial Sequence
  Synthetic oligonucleotide
gagtacgtgaccggtgaaaaatattgggatgtgtgtga

SEQ ID NO: 3567 - DNA, 37 bp, Artificial Sequence
  Synthetic oligonucleotide
tttgcgcgtgagcgttataaaattttccgactaccga

SEQ ID NO: 3568 - DNA, 38 bp, Artificial Sequence
  Synthetic oligonucleotide
ggtcgccttgccacaccgataatcgttgaattttgtga

SEQ ID NO: 3569 - DNA, 35 bp, Artificial Sequence
  Synthetic oligonucleotide
tgccgctggacactatatatggtttctgaaatgcc

SEQ ID NO: 3570 - DNA, 38 bp, Artificial Sequence
  Synthetic oligonucleotide
gagaacgcacaagttgccacgaggtttatttgccttga

SEQ ID NO: 3571 - DNA, 37 bp, Artificial Sequence
  Synthetic oligonucleotide
tgccctgtaaaacctcggacggtttcctgtttgttga

SEQ ID NO: 3572 - DNA, 35 bp, Artificial Sequence
  Synthetic oligonucleotide
tccatctaagattatctcgtatcacactattaaat

SEQ ID NO: 3573 - DNA, 37 bp, Artificial Sequence
  Synthetic oligonucleotide
tatcaacccaaactaaccgctcaataatgaattaaga

SEQ ID NO: 3574 - DNA, 36 bp, Artificial Sequence
  Synthetic oligonucleotide
agtcagtactaaactctctaaacatctggatccaaa

SEQ ID NO: 3575 - DNA, 36 bp, Artificial Sequence
  Synthetic oligonucleotide
ttcgcaagtccaggatcgcgactaaataccttacaa

SEQ ID NO: 3576 - DNA, 36 bp, Artificial Sequence
  Synthetic oligonucleotide
tgcctcatcccgaatagttttgtcaacccatccaca

SEQ ID NO: 3577 - DNA, 37 bp, Artificial Sequence
  Synthetic oligonucleotide
acactctaccaaatagccactcgcaaacatataaaga

SEQ ID NO: 3578 - DNA, 36 bp, Artificial Sequence
  Synthetic oligonucleotide
tcgtcactcactcaatatccttggtacctactcaaa

SEQ ID NO: 3579 - DNA, 36 bp, Artificial Sequence
  Synthetic oligonucleotide
tgcaggcccctgtgaacacctttattgaatagcaca

SEQ ID NO: 3580 - DNA, 35 bp, Artificial Sequence
  Synthetic oligonucleotide
gcactgtgacctaccactttgacctctgtttaaac

SEQ ID NO: 3581 - DNA, 36 bp, Artificial Sequence
  Synthetic oligonucleotide
acctcgaccatctacaaactttgaagccacaccaaa

SEQ ID NO: 3582 - DNA, 36 bp, Artificial Sequence
  Synthetic oligonucleotide
taagcctgactccatcgtctattattttttttaagc

SEQ ID NO: 3583 - DNA, 35 bp, Artificial Sequence
  Synthetic oligonucleotide
atcgccacgaccaaccaccacggatcccacataaa

SEQ ID NO: 3584 - DNA, 36 bp, Artificial Sequence
  Synthetic oligonucleotide
tactcgacgaaatagctaacaacggacccgataaaa

SEQ ID NO: 3585 - DNA, 37 bp, Artificial Sequence
  Synthetic oligonucleotide
aaatcatccgtagtttatcctttgtctccatccaaga

SEQ ID NO: 3586 - DNA, 35 bp, Artificial Sequence
  Synthetic oligonucleotide
gggaacgtaactcaggtttttttcatcccaacaca

SEQ ID NO: 3587 - DNA, 38 bp, Artificial Sequence
  Synthetic oligonucleotide
aactcggccacccgtagacgtatatccaattcacttga

SEQ ID NO: 3588 - DNA, 37 bp, Artificial Sequence
  Synthetic oligonucleotide
ctgcagcttgatcttcgtcacaacacatctattacga

SEQ ID NO: 3589 - DNA, 38 bp, Artificial Sequence
  Synthetic oligonucleotide
ccttccaatctgcatcgctaacgcatacaccattatga

SEQ ID NO: 3590 - DNA, 38 bp, Artificial Sequence
  Synthetic oligonucleotide
gatctattcaccttagccataattatagaccccaatga

SEQ ID NO: 3591 - DNA, 35 bp, Artificial Sequence
  Synthetic oligonucleotide
ccgtactgtttacacatatctatccacgtattaca

SEQ ID NO: 3592 - DNA, 35 bp, Artificial Sequence
  Synthetic oligonucleotide
acgtctgccaaatctactcgcattcgatacacacc

SEQ ID NO: 3593 - DNA, 35 bp, Artificial Sequence
  Synthetic oligonucleotide
ctgtcgacattccgctataaaattaccaacccaat

SEQ ID NO: 3594 - DNA, 36 bp, Artificial Sequence
  Synthetic oligonucleotide
gagtacgcaattattatccgaagtcaactatagcaa

SEQ ID NO: 3595 - DNA, 36 bp, Artificial Sequence
  Synthetic oligonucleotide
gagtaactagtcatcaattctatcttcgcacactaa

SEQ ID NO: 3596 - DNA, 35 bp, Artificial Sequence
  Synthetic oligonucleotide
atgcgctactgcctagctcccgctcgcccatataa

SEQ ID NO: 3597 - DNA, 36 bp, Artificial Sequence
  Synthetic oligonucleotide
acaatatcgatctccaaaactatctcgtgtatctca

SEQ ID NO: 3598 - DNA, 38 bp, Artificial Sequence
  Synthetic oligonucleotide
acgtacccgaccccggcgttaagccgtctttgtactga

SEQ ID NO: 3599 - DNA, 35 bp, Artificial Sequence
  Synthetic oligonucleotide
gtcactcattatatggttctacactacgatcatca

SEQ ID NO: 3600 - DNA, 36 bp, Artificial Sequence
  Synthetic oligonucleotide
gactccgtcgttcatttcactaacacgtatgccaga

SEQ ID NO: 3601 - DNA, 36 bp, Artificial Sequence
  Synthetic oligonucleotide
tagtacccacttattactatcggagttcaaacataa

SEQ ID NO: 3602 - DNA, 36 bp, Artificial Sequence
  Synthetic oligonucleotide
tcgagcgcacagattcgttttccaccgcgaacttca

SEQ ID NO: 3603 - DNA, 37 bp, Artificial Sequence
  Synthetic oligonucleotide
gccacgtttcctactttcgttcgttcgccacgtagga

SEQ ID NO: 3604 - DNA, 35 bp, Artificial Sequence
  Synthetic oligonucleotide
tcactgacccacctctcgatccccaattaaatatt

SEQ ID NO: 3605 - DNA, 36 bp, Artificial Sequence
  Synthetic oligonucleotide
cgcttcccgaatcgagagatcaagcgatcagccgta

SEQ ID NO: 3606 - DNA, 37 bp, Artificial Sequence
  Synthetic oligonucleotide
tcttacgtacgcttcgtagacaattattcatttctga

SEQ ID NO: 3607 - DNA, 38 bp, Artificial Sequence
  Synthetic oligonucleotide
tgctacacgaaacctgtactgctagctatctatcatga

SEQ ID NO: 3608 - DNA, 36 bp, Artificial Sequence
  Synthetic oligonucleotide
ctagctcttcagtcgcactcctagtctcaccattca

SEQ ID NO: 3609 - DNA, 35 bp, Artificial Sequence
  Synthetic oligonucleotide
tgaccattagttaactctatcttttgaaataatct

SEQ ID NO: 3610 - DNA, 36 bp, Artificial Sequence
  Synthetic oligonucleotide
agcctcataggcattccggtgtcacgcaaacacata

SEQ ID NO: 3611 - DNA, 38 bp, Artificial Sequence
  Synthetic oligonucleotide
tgccgtcccgggactcaatccacgtttttattttctca

SEQ ID NO: 3612 - DNA, 38 bp, Artificial Sequence
  Synthetic oligonucleotide
tgccgctaaggcagttactacagggtcttattacatga

SEQ ID NO: 3613 - DNA, 35 bp, Artificial Sequence
  Synthetic oligonucleotide
gaccccttgttaaatgtatccttgttaattacgat

SEQ ID NO: 3614 - DNA, 36 bp, Artificial Sequence
  Synthetic oligonucleotide
caaccgtcctctaatttcacgcctgtcggtcattca

SEQ ID NO: 3615 - DNA, 38 bp, Artificial Sequence
  Synthetic oligonucleotide
ctacaccactattcaaaacgaatatctcatcatactga

SEQ ID NO: 3616 - DNA, 36 bp, Artificial Sequence
  Synthetic oligonucleotide
ttgtacctgcactgcctcaagttattacatctcata

SEQ ID NO: 3617 - DNA, 38 bp, Artificial Sequence
  Synthetic oligonucleotide
taggcgagagcctttgacaggttaccaggtggtggtga

SEQ ID NO: 3618 - DNA, 37 bp, Artificial Sequence
  Synthetic oligonucleotide
agtgactgcgcaaatcactacaacttccatccaaaga

SEQ ID NO: 3619 - DNA, 37 bp, Artificial Sequence
  Synthetic oligonucleotide
gagtgactgctttgacctatacacacaaccaacttaa

SEQ ID NO: 3620 - DNA, 36 bp, Artificial Sequence
  Synthetic oligonucleotide
atttaaccctaaatatttcaacacacaaacaccaca

SEQ ID NO: 3621 - DNA, 38 bp, Artificial Sequence
  Synthetic oligonucleotide
ctctggactgcaacacagtgccgttccgaccttcttga

SEQ ID NO: 3622 - DNA, 36 bp, Artificial Sequence
  Synthetic oligonucleotide
tacttagtcttcttcggatcgcgaccgtggtcggta

SEQ ID NO: 3623 - DNA, 35 bp, Artificial Sequence
  Synthetic oligonucleotide
atatcgtacctattttctaatcttacgctgttcac

SEQ ID NO: 3624 - DNA, 38 bp, Artificial Sequence
  Synthetic oligonucleotide
cccccgcaccacattattccgatcatattatccattga

SEQ ID NO: 3625 - DNA, 35 bp, Artificial Sequence
  Synthetic oligonucleotide
acttaatattccattctcaattacactattcggtt

SEQ ID NO: 3626 - DNA, 38 bp, Artificial Sequence
  Synthetic oligonucleotide
ttcgtcactgctacttttatattaagcccatagaatga

SEQ ID NO: 3627 - DNA, 36 bp, Artificial Sequence
  Synthetic oligonucleotide
cctcgcatccgacttttacaatcacataatcacgta

SEQ ID NO: 3628 - DNA, 36 bp, Artificial Sequence
  Synthetic oligonucleotide
ttgaaagcccctcaatggccacctattttgcattca

SEQ ID NO: 3629 - DNA, 36 bp, Artificial Sequence
  Synthetic oligonucleotide
gagtactgtctctattccacaagcataactacttca

SEQ ID NO: 3630 - DNA, 38 bp, Artificial Sequence
  Synthetic oligonucleotide
aggcgactgccgcagtgccgctgtccgtttcatcatga

SEQ ID NO: 3631 - DNA, 38 bp, Artificial Sequence
  Synthetic oligonucleotide
aatgccaagtcttatcgctagcaataatattgaactga

SEQ ID NO: 3632 - DNA, 36 bp, Artificial Sequence
  Synthetic oligonucleotide
atcccctgtctgcatgcaggcctatgaccgcactca

SEQ ID NO: 3633 - DNA, 37 bp, Artificial Sequence
  Synthetic oligonucleotide
gggggcgggagctacgcaagcatgcctttgacattga

SEQ ID NO: 3634 - DNA, 38 bp, Artificial Sequence
  Synthetic oligonucleotide
taatttctctgcatctatctcaaagcaccactatctta

SEQ ID NO: 3635 - DNA, 36 bp, Artificial Sequence
  Synthetic oligonucleotide
acccatctaccgcattattaacgttataaccctaaa

SEQ ID NO: 3636 - DNA, 37 bp, Artificial Sequence
  Synthetic oligonucleotide
cctgcctatcgccccttcatattctcagatcagcaga

SEQ ID NO: 3637 - DNA, 36 bp, Artificial Sequence
  Synthetic oligonucleotide
ttctcgtctcggggctaatacacatacaattataca

SEQ ID NO: 3638 - DNA, 35 bp, Artificial Sequence
  Synthetic oligonucleotide
gctcattctattttagcatatcatccatctaatcg

SEQ ID NO: 3639 - DNA, 35 bp, Artificial Sequence
  Synthetic oligonucleotide
aatccgtcatgtattaaacacttctatcacattcg

SEQ ID NO: 3640 - DNA, 37 bp, Artificial Sequence
  Synthetic oligonucleotide
actcttctgaatcgaaaccaatctcactttcagggga

SEQ ID NO: 3641 - DNA, 36 bp, Artificial Sequence
  Synthetic oligonucleotide
ctaccatcacatcctatcatcgcatttagtcttgta

SEQ ID NO: 3642 - DNA, 35 bp, Artificial Sequence
  Synthetic oligonucleotide
ctaatcatctcttcaaattcaacggcgaacaaaac

SEQ ID NO: 3643 - DNA, 38 bp, Artificial Sequence
  Synthetic oligonucleotide
taagcacttccgttttaatctttacgacgcacccatga

SEQ ID NO: 3644 - DNA, 36 bp, Artificial Sequence
  Synthetic oligonucleotide
tactatcggcacttctacggaggataccctcgatta

SEQ ID NO: 3645 - DNA, 35 bp, Artificial Sequence
  Synthetic oligonucleotide
tgagctgccgctatggtgaccttctatcccattat

SEQ ID NO: 3646 - DNA, 36 bp, Artificial Sequence
  Synthetic oligonucleotide
ccttacagacggtcaccgtcttgcgggttattacaa

SEQ ID NO: 3647 - DNA, 36 bp, Artificial Sequence
  Synthetic oligonucleotide
ccagtcagtctgttactgtcttgttcccatccctca

SEQ ID NO: 3648 - DNA, 36 bp, Artificial Sequence
  Synthetic oligonucleotide
cgtttccacacgccgattcaaatccctcattaacca

SEQ ID NO: 3649 - DNA, 35 bp, Artificial Sequence
  Synthetic oligonucleotide
acctaacatcctatcaccgcttatgtattgcatca

SEQ ID NO: 3650 - DNA, 35 bp, Artificial Sequence
  Synthetic oligonucleotide
gcagtaggttgtgatgctagctaattatactatac

SEQ ID NO: 3651 - DNA, 38 bp, Artificial Sequence
  Synthetic oligonucleotide
cccgccgcacgtccaatattcaaccatgaccttactga

SEQ ID NO: 3652 - DNA, 35 bp, Artificial Sequence
  Synthetic oligonucleotide
atcgccatcatcgctttatctggtcgtgggaaccc

SEQ ID NO: 3653 - DNA, 36 bp, Artificial Sequence
  Synthetic oligonucleotide
tgtcatccgttatttcattcaccttctactatgtaa

SEQ ID NO: 3654 - DNA, 37 bp, Artificial Sequence
  Synthetic oligonucleotide
tactattatcatccacgccatcagccgggtcttcgga

SEQ ID NO: 3655 - DNA, 38 bp, Artificial Sequence
  Synthetic oligonucleotide
ccttacatacatactccgcatacgtgcctatttaatga

SEQ ID NO: 3656 - DNA, 37 bp, Artificial Sequence
  Synthetic oligonucleotide
acaactatcaaataaacctgcgccctctattaatgga

SEQ ID NO: 3657 - DNA, 35 bp, Artificial Sequence
  Synthetic oligonucleotide
gcaccatcgccggactgctcatatccccgttgtaa

SEQ ID NO: 3658 - DNA, 37 bp, Artificial Sequence
  Synthetic oligonucleotide
ctcgcagtaatggtgcccacatgttacgtctctttga

SEQ ID NO: 3659 - DNA, 36 bp, Artificial Sequence
  Synthetic oligonucleotide
ttagtactgtcattcgaggattcgaatctagcttta

SEQ ID NO: 3660 - DNA, 36 bp, Artificial Sequence
  Synthetic oligonucleotide
tgtaaacgtacgatattacttccgatccatacatca

SEQ ID NO: 3661 - DNA, 37 bp, Artificial Sequence
  Synthetic oligonucleotide
attcaagcaatctagtaattattctttcactgccgga

SEQ ID NO: 3662 - DNA, 38 bp, Artificial Sequence
  Synthetic oligonucleotide
taccatctctattccacgtccacgacacgctgccatga

SEQ ID NO: 3663 - DNA, 36 bp, Artificial Sequence
  Synthetic oligonucleotide
tgttgacaatgccgctgtcccgtctacccttcgata

SEQ ID NO: 3664 - DNA, 35 bp, Artificial Sequence
  Synthetic oligonucleotide
catgtcgccgtcgcgcacagcctacatcccactta

SEQ ID NO: 3665 - DNA, 35 bp, Artificial Sequence
  Synthetic oligonucleotide
gagtacttctcataaacgaaatatcaaattcgaat

SEQ ID NO: 3666 - DNA, 38 bp, Artificial Sequence
  Synthetic oligonucleotide
tgactgcgaaactaacgtatccccatatatacaattga

SEQ ID NO: 3667 - DNA, 36 bp, Artificial Sequence
  Synthetic oligonucleotide
ttcagcgcgttcttcacagcggggtagcactcatca

SEQ ID NO: 3668 - DNA, 35 bp, Artificial Sequence
  Synthetic oligonucleotide
tcagtacatcattaatcaccatatcacgcattatc

SEQ ID NO: 3669 - DNA, 36 bp, Artificial Sequence
  Synthetic oligonucleotide
agtctactgcatcatctcccttactccaagtagtaa

SEQ ID NO: 3670 - DNA, 36 bp, Artificial Sequence
  Synthetic oligonucleotide
gctcatactcagcactgcgaattgccagtccttcac

SEQ ID NO: 3671 - DNA, 38 bp, Artificial Sequence
  Synthetic oligonucleotide
gctgcatctcgtcactccaggtggttggtacattgtga

SEQ ID NO: 3672 - DNA, 35 bp, Artificial Sequence
  Synthetic oligonucleotide
gttagctagaacgaacgcacgtcttctatctttta

SEQ ID NO: 3673 - DNA, 36 bp, Artificial Sequence
  Synthetic oligonucleotide
ttcgttattgccttagttacactctattataggtta

SEQ ID NO: 3674 - DNA, 37 bp, Artificial Sequence
  Synthetic oligonucleotide
tatcggacacttactacattaccgtcgcttataccga

SEQ ID NO: 3675 - DNA, 38 bp, Artificial Sequence
  Synthetic oligonucleotide
atcaacgtactcgaacgcgtccacaccccaccatctga

SEQ ID NO: 3676 - DNA, 38 bp, Artificial Sequence
  Synthetic oligonucleotide
gagctactctgaatctcattgatatctacaataaatga

SEQ ID NO: 3677 - DNA, 36 bp, Artificial Sequence
  Synthetic oligonucleotide
taataggacggcgggctcttgccgatatttcctgta

SEQ ID NO: 3678 - DNA, 35 bp, Artificial Sequence
  Synthetic oligonucleotide
catcttatacagctcagcctctattcccatacgtc

SEQ ID NO: 3679 - DNA, 36 bp, Artificial Sequence
  Synthetic oligonucleotide
ctgccggatcttgcacgcactgctattatatttcca

SEQ ID NO: 3680 - DNA, 35 bp, Artificial Sequence
  Synthetic oligonucleotide
actgcctaaggctatcgcatcaatatgaactcaac

SEQ ID NO: 3681 - DNA, 37 bp, Artificial Sequence
  Synthetic oligonucleotide
ctactgcacgacgcgagtccttatcaatatctcacga

SEQ ID NO: 3682 - DNA, 35 bp, Artificial Sequence
  Synthetic oligonucleotide
gagtacttacgtaacgagttattaatgtccaaaat

SEQ ID NO: 3683 - DNA, 36 bp, Artificial Sequence
  Synthetic oligonucleotide
aaggactcaatgccactatacgacttattccaatca

SEQ ID NO: 3684 - DNA, 35 bp, Artificial Sequence
  Synthetic oligonucleotide
cttttctagctagcatttacacttttatacacaac

SEQ ID NO: 3685 - DNA, 37 bp, Artificial Sequence
  Synthetic oligonucleotide
tcgggttctccctctcgccacctaggtttaaaacgga

SEQ ID NO: 3686 - DNA, 38 bp, Artificial Sequence
  Synthetic oligonucleotide
cgcatgcactgaacatatacacatctcgtcgctcctga

SEQ ID NO: 3687 - DNA, 36 bp, Artificial Sequence
  Synthetic oligonucleotide
ttacctctctacaccatttaccaacggctacgccga

SEQ ID NO: 3688 - DNA, 38 bp, Artificial Sequence
  Synthetic oligonucleotide
gacgtcttctttcacagcatgccgtaacagttttctga

SEQ ID NO: 3689 - DNA, 35 bp, Artificial Sequence
  Synthetic oligonucleotide
ctacagactaactagttcccgaattctgccacaac

SEQ ID NO: 3690 - DNA, 37 bp, Artificial Sequence
  Synthetic oligonucleotide
aatccacgtgcccaacataaagatctaactcacaaga

SEQ ID NO: 3691 - DNA, 36 bp, Artificial Sequence
  Synthetic oligonucleotide
tacgacgcctctgttaatccgtttttatataccaca

SEQ ID NO: 3692 - DNA, 38 bp, Artificial Sequence
  Synthetic oligonucleotide
ggcgggaatcacgccaaacctctgtcacctatcgctga

SEQ ID NO: 3693 - DNA, 38 bp, Artificial Sequence
  Synthetic oligonucleotide
cttctgccacttcatctcgtcaaggttcatttcgttga

SEQ ID NO: 3694 - DNA, 36 bp, Artificial Sequence
  Synthetic oligonucleotide
cgcacaacgtaccggtccagggaacacattttcgca

SEQ ID NO: 3695 - DNA, 38 bp, Artificial Sequence
  Synthetic oligonucleotide
ctctcaccagcacgtcccacacattttcacaaacctga

SEQ ID NO: 3696 - DNA, 38 bp, Artificial Sequence
  Synthetic oligonucleotide
tttctcgcgcggcaggcatccgttctaatataccatga

SEQ ID NO: 3697 - DNA, 36 bp, Artificial Sequence
  Synthetic oligonucleotide
accacaacttatcgcatctcattgattggactaata

SEQ ID NO: 3698 - DNA, 35 bp, Artificial Sequence
  Synthetic oligonucleotide
tcccctcagccatcgtggaacaactgcggtgtttc

SEQ ID NO: 3699 - DNA, 36 bp, Artificial Sequence
  Synthetic oligonucleotide
atacgtctgcgattatttagtggtctctcacacata

SEQ ID NO: 3700 - DNA, 36 bp, Artificial Sequence
  Synthetic oligonucleotide
cacgagtcgccacacctcagctgatgctcacctaca

SEQ ID NO: 3701 - DNA, 36 bp, Artificial Sequence
  Synthetic oligonucleotide
agctacgtaccgaatttcgttcataataggtaatga

SEQ ID NO: 3702 - DNA, 35 bp, Artificial Sequence
  Synthetic oligonucleotide
acacattcggccatgtcatcctgcacttcacgtga

SEQ ID NO: 3703 - DNA, 38 bp, Artificial Sequence
  Synthetic oligonucleotide
taaccatcgatcccaacacatgtcagcacggcacctga

SEQ ID NO: 3704 - DNA, 35 bp, Artificial Sequence
  Synthetic oligonucleotide
tacctagtccggccaccagtctcccacacattacg

SEQ ID NO: 3705 - DNA, 35 bp, Artificial Sequence
  Synthetic oligonucleotide
atgtctgcggaccatctatcggatcgccgaacctt

SEQ ID NO: 3706 - DNA, 37 bp, Artificial Sequence
  Synthetic oligonucleotide
cgcacttaccatgcgtatcctttatcggtctgaacga

SEQ ID NO: 3707 - DNA, 37 bp, Artificial Sequence
  Synthetic oligonucleotide
gagtcccggtcccccgggtccatcatctactccatga

SEQ ID NO: 3708 - DNA, 37 bp, Artificial Sequence
  Synthetic oligonucleotide
atctgctgttgtctttcccattagttatcccaatcga

SEQ ID NO: 3709 - DNA, 38 bp, Artificial Sequence
  Synthetic oligonucleotide
agccacacctaatagctcacatccggttaccgtcctga

SEQ ID NO: 3710 - DNA, 38 bp, Artificial Sequence
  Synthetic oligonucleotide
ccggctcagagccacgctatatcttcactactaactga

SEQ ID NO: 3711 - DNA, 37 bp, Artificial Sequence
  Synthetic oligonucleotide
gcgaagtttcacttccagtttctgacgcccttcatga

SEQ ID NO: 3712 - DNA, 36 bp, Artificial Sequence
  Synthetic oligonucleotide
tcctaggctgctcttcgccgcacaccggacttcaca

SEQ ID NO: 3713 - DNA, 38 bp, Artificial Sequence
  Synthetic oligonucleotide
catgcaccggtctcacggtcgcataataactatcatta

SEQ ID NO: 3714 - DNA, 38 bp, Artificial Sequence
  Synthetic oligonucleotide
tgtcaatatctgaatcggtggatattggcggaggttga

SEQ ID NO: 3715 - DNA, 37 bp, Artificial Sequence
  Synthetic oligonucleotide
gggtaccgtgcagactcacagaacctaatatatagga

SEQ ID NO: 3716 - DNA, 37 bp, Artificial Sequence
  Synthetic oligonucleotide
tttaccctgcatcgatcgcgagacccaccaatcatga

SEQ ID NO: 3717 - DNA, 37 bp, Artificial Sequence
  Synthetic oligonucleotide
tggcggcccttctaccgcccgtcaccacctctatgga

SEQ ID NO: 3718 - DNA, 36 bp, Artificial Sequence
  Synthetic oligonucleotide
tacaccaataaccatacaactacatctaatacgtta

SEQ ID NO: 3719 - DNA, 37 bp, Artificial Sequence
  Synthetic oligonucleotide
gagtactcgtgatcttttacacacatctgcctaaaga

SEQ ID NO: 3720 - DNA, 36 bp, Artificial Sequence
  Synthetic oligonucleotide
agcaccggaatgcccgggcccttgtacgcctagtga

SEQ ID NO: 3721 - DNA, 35 bp, Artificial Sequence
  Synthetic oligonucleotide
ttaagtcatctgcactagtacgccctatattaaaa

SEQ ID NO: 3722 - DNA, 37 bp, Artificial Sequence
  Synthetic oligonucleotide
agtctcgcagaaaaaatctatttcccatttgactgga

SEQ ID NO: 3723 - DNA, 36 bp, Artificial Sequence
  Synthetic oligonucleotide
aggaactgcctaccatcgatttttaataccacacga

SEQ ID NO: 3724 - DNA, 36 bp, Artificial Sequence
  Synthetic oligonucleotide
tttcttcttatgagggggaggtgcggttcggaataa

SEQ ID NO: 3725 - DNA, 36 bp, Artificial Sequence
  Synthetic oligonucleotide
gccaggattcggccattttacctatctcgatttaaa

SEQ ID NO: 3726 - DNA, 38 bp, Artificial Sequence
  Synthetic oligonucleotide
cgtgccgaacaactcacacgctacacctttatttttaa

SEQ ID NO: 3727 - DNA, 36 bp, Artificial Sequence
  Synthetic oligonucleotide
agactatcataactccttcacgaaccttccacataa

SEQ ID NO: 3728 - DNA, 37 bp, Artificial Sequence
  Synthetic oligonucleotide
tcaccgaccctcagtacttcccctgcgcatgactaga

SEQ ID NO: 3729 - DNA, 35 bp, Artificial Sequence
  Synthetic oligonucleotide
tctcactactacccactaaaatcggttgatactac

SEQ ID NO: 3730 - DNA, 35 bp, Artificial Sequence
  Synthetic oligonucleotide
acgcacgggtatgcatcattgatggtttccggtac

SEQ ID NO: 3731 - DNA, 38 bp, Artificial Sequence
  Synthetic oligonucleotide
acgttcctgtacgccgcgggcggtattttcacaattga

SEQ ID NO: 3732 - DNA, 38 bp, Artificial Sequence
  Synthetic oligonucleotide
tcgccctatcaactccctgtattttcatccctcaatca

SEQ ID NO: 3733 - DNA, 35 bp, Artificial Sequence
  Synthetic oligonucleotide
cgcctacgatcacttccccgcgcgactgtctcatc

SEQ ID NO: 3734 - DNA, 37 bp, Artificial Sequence
  Synthetic oligonucleotide
cacaacatatctactctatactagctcaattcaccga

SEQ ID NO: 3735 - DNA, 36 bp, Artificial Sequence
  Synthetic oligonucleotide
cattgcgaccttatcccaccacgaattgccactaaa

SEQ ID NO: 3736 - DNA, 35 bp, Artificial Sequence
  Synthetic oligonucleotide
ttactatccagtatcacaccgaccttccaatccga

SEQ ID NO: 3737 - DNA, 37 bp, Artificial Sequence
  Synthetic oligonucleotide
agaacttgatcgtttctggggtttgggaatcatgtga

SEQ ID NO: 3738 - DNA, 35 bp, Artificial Sequence
  Synthetic oligonucleotide
gggcttgcaaacaacttcacgtatgatccgcacct

SEQ ID NO: 3739 - DNA, 35 bp, Artificial Sequence
  Synthetic oligonucleotide
aatcccgtgagggtcgtttcaagtttcaataatcc

SEQ ID NO: 3740 - DNA, 37 bp, Artificial Sequence
  Synthetic oligonucleotide
ggcttacacagccacctatctttggccaatttataga

SEQ ID NO: 3741 - DNA, 36 bp, Artificial Sequence
  Synthetic oligonucleotide
agcgccttaggcttccttctgcggctaaccatcata

SEQ ID NO: 3742 - DNA, 35 bp, Artificial Sequence
  Synthetic oligonucleotide
gaattagctcacttactatttcattttgaccataa

SEQ ID NO: 3743 - DNA, 35 bp, Artificial Sequence
  Synthetic oligonucleotide
ggccttccccttcatccgcctcaacgctggccacc

SEQ ID NO: 3744 - DNA, 36 bp, Artificial Sequence
  Synthetic oligonucleotide
aggcaggcgactacggatcaacatttctatacccta

SEQ ID NO: 3745 - DNA, 36 bp, Artificial Sequence
  Synthetic oligonucleotide
gttagtgcgtattgtaggctgacgaacgctaccgta

SEQ ID NO: 3746 - DNA, 36 bp, Artificial Sequence
  Synthetic oligonucleotide
gcggcccggcgatcctctagtccaaccggtctacta

SEQ ID NO: 3747 - DNA, 38 bp, Artificial Sequence
  Synthetic oligonucleotide
gggggggcacgtacgacattaggtccttaaatcactca

SEQ ID NO: 3748 - DNA, 36 bp, Artificial Sequence
  Synthetic oligonucleotide
taaccgcgtacggactcaagccacccctattaaaca

SEQ ID NO: 3749 - DNA, 35 bp, Artificial Sequence
  Synthetic oligonucleotide
gctatttgttaagtccagtcgcaaatcaccactat

SEQ ID NO: 3750 - DNA, 36 bp, Artificial Sequence
  Synthetic oligonucleotide
ccgggcactcggactttcactctgtcagtttctaca

SEQ ID NO: 3751 - DNA, 36 bp, Artificial Sequence
  Synthetic oligonucleotide
tcgcaatatatatctccgtggtgtaccatcagtcaa

SEQ ID NO: 3752 - DNA, 35 bp, Artificial Sequence
  Synthetic oligonucleotide
ccctctactggcttctacgtcgcacgactgctacc

SEQ ID NO: 3753 - DNA, 34 bp, Artificial Sequence
  Synthetic oligonucleotide
aacctcacatgctggcgatcactagcaaaccacc

SEQ ID NO: 3754 - DNA, 38 bp, Artificial Sequence
  Synthetic oligonucleotide
aaactgccttgaacaagtttcgatatcacattccatga

SEQ ID NO: 3755 - DNA, 35 bp, Artificial Sequence
  Synthetic oligonucleotide
cctcataaccgattaccaacgccatcaaaatatag

SEQ ID NO: 3756 - DNA, 36 bp, Artificial Sequence
  Synthetic oligonucleotide
aacaaggccaaaatacgcatataattctggttgaaa

SEQ ID NO: 3757 - DNA, 35 bp, Artificial Sequence
  Synthetic oligonucleotide
agtgcgaactcttattactgctattaaaactgtcc

SEQ ID NO: 3758 - DNA, 36 bp, Artificial Sequence
  Synthetic oligonucleotide
tcttgctacgtttgttcgcaccaaacttgtcctgca

SEQ ID NO: 3759 - DNA, 34 bp, Artificial Sequence
  Synthetic oligonucleotide
gttctcgcgcgcacatcaattatatcacaaataa

SEQ ID NO: 3760 - DNA, 38 bp, Artificial Sequence
  Synthetic oligonucleotide
atttacgttcgcttcatggacgcggtcataggacctga

SEQ ID NO: 3761 - DNA, 37 bp, Artificial Sequence
  Synthetic oligonucleotide
tcgcaccggccctcaataccatttacacatccacgga

SEQ ID NO: 3762 - DNA, 36 bp, Artificial Sequence
  Synthetic oligonucleotide
ctcgccacgacttaattctcaattcctcacaactga

SEQ ID NO: 3763 - DNA, 36 bp, Artificial Sequence
  Synthetic oligonucleotide
aactgtacggcgcaattttactctcaagtaccaaaa

SEQ ID NO: 3764 - DNA, 36 bp, Artificial Sequence
  Synthetic oligonucleotide
cactgtcaagttttccattccactatacatcaatca

SEQ ID NO: 3765 - DNA, 37 bp, Artificial Sequence
  Synthetic oligonucleotide
ctttcatcataacccggggaatttaccggccgcctca

SEQ ID NO: 3766 - DNA, 38 bp, Artificial Sequence
  Synthetic oligonucleotide
ggtatttgctagatcttcaattacctcgccgtatataa

SEQ ID NO: 3767 - DNA, 35 bp, Artificial Sequence
  Synthetic oligonucleotide
tgcctgcattgctcgtggaggctcattgactttca

SEQ ID NO: 3768 - DNA, 38 bp, Artificial Sequence
  Synthetic oligonucleotide
ctctgtccttgctttctctctcattccgatgactatga

SEQ ID NO: 3769 - DNA, 38 bp, Artificial Sequence
  Synthetic oligonucleotide
gatctccacttcaggcgccattctatacccattaatga

SEQ ID NO: 3770 - DNA, 38 bp, Artificial Sequence
  Synthetic oligonucleotide
tatcaattttattaataccctcattgtgctcctactga

SEQ ID NO: 3771 - DNA, 35 bp, Artificial Sequence
  Synthetic oligonucleotide
gatgcgagaaccactatccatcccacacgccgatt

SEQ ID NO: 3772 - DNA, 36 bp, Artificial Sequence
  Synthetic oligonucleotide
agcactctgtcaggtcgatcattatttcacaacaca

SEQ ID NO: 3773 - DNA, 36 bp, Artificial Sequence
  Synthetic oligonucleotide
gagttcggccctcgttgatcctcgattacaaattaa

SEQ ID NO: 3774 - DNA, 38 bp, Artificial Sequence
  Synthetic oligonucleotide
gggggtacgtccagcttatcatctcataccattattga

SEQ ID NO: 3775 - DNA, 38 bp, Artificial Sequence
  Synthetic oligonucleotide
cgcacgtcacgagcacaccaacactacttcaccactga

SEQ ID NO: 3776 - DNA, 35 bp, Artificial Sequence
  Synthetic oligonucleotide
acatgtcgtccacctatgttgttaccattatttat

SEQ ID NO: 3777 - DNA, 35 bp, Artificial Sequence
  Synthetic oligonucleotide
attcaatcccctcctatggcttgccccccggttct

SEQ ID NO: 3778 - DNA, 36 bp, Artificial Sequence
  Synthetic oligonucleotide
cggtattcgtacgtctgcgcgcaacccattataaca

SEQ ID NO: 3779 - DNA, 38 bp, Artificial Sequence
  Synthetic oligonucleotide
tccatgcagccacgctcagttactactactagtgatga

SEQ ID NO: 3780 - DNA, 35 bp, Artificial Sequence
  Synthetic oligonucleotide
atcacatttccatcgatctccaaggttctcaaact

SEQ ID NO: 3781 - DNA, 35 bp, Artificial Sequence
  Synthetic oligonucleotide
gtgttcctcacactaatcgttctactttcttaact

SEQ ID NO: 3782 - DNA, 36 bp, Artificial Sequence
  Synthetic oligonucleotide
tcacactccatagatctctcggtagacgcagtccga

SEQ ID NO: 3783 - DNA, 36 bp, Artificial Sequence
  Synthetic oligonucleotide
ccattacaacactacctctatatggtcctatccgca

SEQ ID NO: 3784 - DNA, 36 bp, Artificial Sequence
  Synthetic oligonucleotide
cgctatctctacgccaattaagtcgctcctggtaca

SEQ ID NO: 3785 - DNA, 36 bp, Artificial Sequence
  Synthetic oligonucleotide
gcagataccaagtcattactttattatacataacca

SEQ ID NO: 3786 - DNA, 36 bp, Artificial Sequence
  Synthetic oligonucleotide
attcgtactctataaattccaatggcgtacccacaa

SEQ ID NO: 3787 - DNA, 35 bp, Artificial Sequence
  Synthetic oligonucleotide
tcagtacaccattaatcaccatatcacgcattatc

SEQ ID NO: 3788 - DNA, 38 bp, Artificial Sequence
  Synthetic oligonucleotide
aaccgggtacccacaccacccgtaaccatcccaattta

SEQ ID NO: 3789 - DNA, 35 bp, Artificial Sequence
  Synthetic oligonucleotide
aaacggacgcgcgaaactagttggaacattattcc

SEQ ID NO: 3790 - DNA, 35 bp, Artificial Sequence
  Synthetic oligonucleotide
aacaacgaaataggaaatcctctgctgaaccaaat

SEQ ID NO: 3791 - DNA, 35 bp, Artificial Sequence
  Synthetic oligonucleotide
catgccccccgagtttcgtagttattttcctaaac

SEQ ID NO: 3792 - DNA, 35 bp, Artificial Sequence
  Synthetic oligonucleotide
acgcaattcagaacatattcgcaactctttcaaat

SEQ ID NO: 3793 - DNA, 35 bp, Artificial Sequence
  Synthetic oligonucleotide
tttcgaattctccacctgatacccgccacattaaa

SEQ ID NO: 3794 - DNA, 36 bp, Artificial Sequence
  Synthetic oligonucleotide
accctcctattaacccatcaaaagttcgctaccata

SEQ ID NO: 3795 - DNA, 37 bp, Artificial Sequence
  Synthetic oligonucleotide
atactccacaacgaacatccaaactgtttacatcaga

SEQ ID NO: 3796 - DNA, 36 bp, Artificial Sequence
  Synthetic oligonucleotide
gagtacctagccgcaccggtcttaattttcttaaaa

SEQ ID NO: 3797 - DNA, 35 bp, Artificial Sequence
  Synthetic oligonucleotide
aagctgcacggatcttccatgtcccctctattaaa

SEQ ID NO: 3798 - DNA, 37 bp, Artificial Sequence
  Synthetic oligonucleotide
agttctattatggctcctaactgttcttgttttcaga

SEQ ID NO: 3799 - DNA, 36 bp, Artificial Sequence
  Synthetic oligonucleotide
acactcgcctagaagccaccacccatttctcataaa

SEQ ID NO: 3800 - DNA, 37 bp, Artificial Sequence
  Synthetic oligonucleotide
cctccaccatccgaacattaactaattacccgccaga

SEQ ID NO: 3801 - DNA, 35 bp, Artificial Sequence
  Synthetic oligonucleotide
tacttcctatagttacccacatctactaaccaaac

SEQ ID NO: 3802 - DNA, 36 bp, Artificial Sequence
  Synthetic oligonucleotide
gagtactggcacgcgataccctaactgtacatcaca

SEQ ID NO: 3803 - DNA, 35 bp, Artificial Sequence
  Synthetic oligonucleotide
agccagcaaggctagcatcacataattctcatatc

SEQ ID NO: 3804 - DNA, 37 bp, Artificial Sequence
  Synthetic oligonucleotide
atgaatccgcactactaaaacaatttatccttataga

SEQ ID NO: 3805 - DNA, 37 bp, Artificial Sequence
  Synthetic oligonucleotide
tctgtgctggctttagaaggttttctgttttttccta

SEQ ID NO: 3806 - DNA, 35 bp, Artificial Sequence
  Synthetic oligonucleotide
acatagcactgctaggtttatctcattgtttttaa

SEQ ID NO: 3807 - DNA, 38 bp, Artificial Sequence
  Synthetic oligonucleotide
ttctggcaattggcctctcactctctatggttttgtga

SEQ ID NO: 3808 - DNA, 35 bp, Artificial Sequence
  Synthetic oligonucleotide
ttttgatttattctgcttgctgtttgggcttcttt

SEQ ID NO: 3809 - DNA, 38 bp, Artificial Sequence
  Synthetic oligonucleotide
tatattcacaatcgattcttttcacttcctcattttga

SEQ ID NO: 3810 - DNA, 35 bp, Artificial Sequence
  Synthetic oligonucleotide
tgtaggagttgtctctttttcatattttctgtctt

SEQ ID NO: 3811 - DNA, 35 bp, Artificial Sequence
  Synthetic oligonucleotide
taggactggttaatcctccgaaattgtttttctat

SEQ ID NO: 3812 - DNA, 38 bp, Artificial Sequence
  Synthetic oligonucleotide
ttctatcgggggagttcctactctggtttttttcttga

SEQ ID NO: 3813 - DNA, 35 bp, Artificial Sequence
  Synthetic oligonucleotide
gcctgggtggttatttttttccatatcgaaattta

SEQ ID NO: 3814 - DNA, 36 bp, Artificial Sequence
  Synthetic oligonucleotide
ttagttttctcactgtttcccgttgactattctcta

SEQ ID NO: 3815 - DNA, 38 bp, Artificial Sequence
  Synthetic oligonucleotide
ctagtgaccactgcttcttttggttatcttaatcttga

SEQ ID NO: 3816 - DNA, 35 bp, Artificial Sequence
  Synthetic oligonucleotide
gcctgggttgttatttttttccatatcgaaattta

SEQ ID NO: 3817 - DNA, 38 bp, Artificial Sequence
  Synthetic oligonucleotide
tgtatgattttggtttttgttttggtttcacgtggtga

SEQ ID NO: 3818 - DNA, 38 bp, Artificial Sequence
  Synthetic oligonucleotide
gcagtgttatttctcttggtttctttgatttcacttga

SEQ ID NO: 3819 - DNA, 38 bp, Artificial Sequence
  Synthetic oligonucleotide
ttctatcgggggagttcctactcttgtttttttcttga

SEQ ID NO: 3820 - DNA, 38 bp, Artificial Sequence
  Synthetic oligonucleotide
ggcctggttctcgtacatctgtattttggtttttctga

SEQ ID NO: 3821 - DNA, 35 bp, Artificial Sequence
  Synthetic oligonucleotide
gcacccggggtttttatctgagttgtttttcattt

SEQ ID NO: 3822 - DNA, 36 bp, Artificial Sequence
  Synthetic oligonucleotide
tttatccattgtccttggactctcctccgtttagaa

SEQ ID NO: 3823 - DNA, 38 bp, Artificial Sequence
  Synthetic oligonucleotide
ctgcgctggccaatctcatgttttgtttttattaatga

SEQ ID NO: 3824 - DNA, 36 bp, Artificial Sequence
  Synthetic oligonucleotide
tgcttctttaatctgttttctactattttgatataa

SEQ ID NO: 3825 - DNA, 38 bp, Artificial Sequence
  Synthetic oligonucleotide
gatcccgaattgttttcctattaatcgttttcccatga

SEQ ID NO: 3826 - DNA, 38 bp, Artificial Sequence
  Synthetic oligonucleotide
tcccttgggactctttggttattaacatttctctttga

SEQ ID NO: 3827 - DNA, 36 bp, Artificial Sequence
  Synthetic oligonucleotide
tctaactgctggaccctcctgttttttattagtcta

SEQ ID NO: 3828 - DNA, 38 bp, Artificial Sequence
  Synthetic oligonucleotide
gcagtacggaggtttaagttgtttctcctattttttga

SEQ ID NO: 3829 - DNA, 35 bp, Artificial Sequence
  Synthetic oligonucleotide
atgaccgtttcttggaagtttccgattttttttgt

SEQ ID NO: 3830 - DNA, 36 bp, Artificial Sequence
  Synthetic oligonucleotide
taatgcattgttcgcacctggtttttttaatggtta

SEQ ID NO: 3831 - DNA, 38 bp, Artificial Sequence
  Synthetic oligonucleotide
gagcaataattcctgtttctatctctacaaccatttga

SEQ ID NO: 3832 - DNA, 36 bp, Artificial Sequence
  Synthetic oligonucleotide
actgacttaatctaatttgttttccattctcatgaa

SEQ ID NO: 3833 - DNA, 38 bp, Artificial Sequence
  Synthetic oligonucleotide
gtgcacgggcgttttttaatttaagtttcttgttttga

SEQ ID NO: 3834 - DNA, 35 bp, Artificial Sequence
  Synthetic oligonucleotide
ttatactatccaaatctcgtgtctttcctcattat

SEQ ID NO: 3835 - DNA, 36 bp, Artificial Sequence
  Synthetic oligonucleotide
gtcgtaatttgttctttatatctatttcttgttgta

SEQ ID NO: 3836 - DNA, 36 bp, Artificial Sequence
  Synthetic oligonucleotide
ccttggagttgctggtaacctgttgttttttattga

SEQ ID NO: 3837 - DNA, 35 bp, Artificial Sequence
  Synthetic oligonucleotide
acgtgcctgataattatatgtatgtttcttgtttt

SEQ ID NO: 3838 - DNA, 36 bp, Artificial Sequence
  Synthetic oligonucleotide
atctttcacttagtctcggagttttttgtttcctta

SEQ ID NO: 3839 - DNA, 36 bp, Artificial Sequence
  Synthetic oligonucleotide
attcgtttatttttatttcctgattggtttatttca

SEQ ID NO: 3840 - DNA, 35 bp, Artificial Sequence
  Synthetic oligonucleotide
ttcactggtttttttctttctgacctatagattgc

SEQ ID NO: 3841 - DNA, 36 bp, Artificial Sequence
  Synthetic oligonucleotide
ttgctaatttctgggtttgttacgtccttttatata

SEQ ID NO: 3842 - DNA, 36 bp, Artificial Sequence
  Synthetic oligonucleotide
tacttttttgatttttgatcttggcccacgaaataa

SEQ ID NO: 3843 - DNA, 37 bp, Artificial Sequence
  Synthetic oligonucleotide
tctctcttgtcaatagaatttttgtttgtatcttcga

SEQ ID NO: 3844 - DNA, 36 bp, Artificial Sequence
  Synthetic oligonucleotide
tgtgctcactatgtctctccgttgtctgttttttta

SEQ ID NO: 3845 - DNA, 36 bp, Artificial Sequence
  Synthetic oligonucleotide
aatcaagcagggttcaccattgtcgtttttttttta

SEQ ID NO: 3846 - DNA, 38 bp, Artificial Sequence
  Synthetic oligonucleotide
gatgtactgttcgttttgttttgtccttttcatcatga

SEQ ID NO: 3847 - DNA, 36 bp, Artificial Sequence
  Synthetic oligonucleotide
cgcatactgccgcatcgcatttgttttattgttgta

SEQ ID NO: 3848 - DNA, 35 bp, Artificial Sequence
  Synthetic oligonucleotide
ttgtggttgttcatacctgctatcttttttcgttt

SEQ ID NO: 3849 - DNA, 38 bp, Artificial Sequence
  Synthetic oligonucleotide
gagtgatgcggaataaatcgctttgttttgtttcctga

SEQ ID NO: 3850 - DNA, 35 bp, Artificial Sequence
  Synthetic oligonucleotide
ttagtaggtaactttcactgtttttttatcgtttt

SEQ ID NO: 3851 - DNA, 37 bp, Artificial Sequence
  Synthetic oligonucleotide
gggtctctttttctttaactcttttatctaaatttga

SEQ ID NO: 3852 - DNA, 38 bp, Artificial Sequence
  Synthetic oligonucleotide
tgacgtttttttgactggtttttctgaagtggttttga

SEQ ID NO: 3853 - DNA, 35 bp, Artificial Sequence
  Synthetic oligonucleotide
gacgccaccgttttttattttagttgatttagata

SEQ ID NO: 3854 - DNA, 38 bp, Artificial Sequence
  Synthetic oligonucleotide
tcataaatcactctatctttgtttttcagtcttagtga

SEQ ID NO: 3855 - DNA, 35 bp, Artificial Sequence
  Synthetic oligonucleotide
ttacggatgcttttttttgtcctgagattactttt

SEQ ID NO: 3856 - DNA, 35 bp, Artificial Sequence
  Synthetic oligonucleotide
gactgtacgatggcttaattgttttgtattttgtt

SEQ ID NO: 3857 - DNA, 35 bp, Artificial Sequence
  Synthetic oligonucleotide
ttattgtttctaccatgtttgttgcatatgttttt

SEQ ID NO: 3858 - DNA, 38 bp, Artificial Sequence
  Synthetic oligonucleotide
tttttccgttcaactctactttcgatatattatggtga

SEQ ID NO: 3859 - DNA, 37 bp, Artificial Sequence
  Synthetic oligonucleotide
tagtctttccgattgtttttgttatttatatgcctga

SEQ ID NO: 3860 - DNA, 36 bp, Artificial Sequence
  Synthetic oligonucleotide
gcggggcgccctcgatttggttttatttttctcaca

SEQ ID NO: 3861 - DNA, 37 bp, Artificial Sequence
  Synthetic oligonucleotide
tgttacttttttatcttgttctgccatctctaattga

SEQ ID NO: 3862 - DNA, 36 bp, Artificial Sequence
  Synthetic oligonucleotide
tatctatcactaagtttttatatctaaggtccatta

SEQ ID NO: 3863 - DNA, 38 bp, Artificial Sequence
  Synthetic oligonucleotide
ggctttgttcattttcttactctttgtttgtagtttga

SEQ ID NO: 3864 - DNA, 38 bp, Artificial Sequence
  Synthetic oligonucleotide
gccggtttatttaccgagtttttcatcttttcttatga

SEQ ID NO: 3865 - DNA, 37 bp, Artificial Sequence
  Synthetic oligonucleotide
agggtactagcattttcgattttgtgaaattttctga

SEQ ID NO: 3866 - DNA, 38 bp, Artificial Sequence
  Synthetic oligonucleotide
atactgcagtagcacttgtcgtttttctccaatattga

SEQ ID NO: 3867 - DNA, 35 bp, Artificial Sequence
  Synthetic oligonucleotide
ttcgttcctaagaatttgccatttgttttttggtc

SEQ ID NO: 3868 - DNA, 37 bp, Artificial Sequence
  Synthetic oligonucleotide
tcactctatccagcatgcgaggtgttattctatttga

SEQ ID NO: 3869 - DNA, 35 bp, Artificial Sequence
  Synthetic oligonucleotide
agtcgatagaataattttttggttttctcactcat

SEQ ID NO: 3870 - DNA, 35 bp, Artificial Sequence
  Synthetic oligonucleotide
tactgtccttttcaattcgtgtcttggttttatta

SEQ ID NO: 3871 - DNA, 38 bp, Artificial Sequence
  Synthetic oligonucleotide
taaacgtggtactgcgcacggttatttctttctcttga

SEQ ID NO: 3872 - DNA, 38 bp, Artificial Sequence
  Synthetic oligonucleotide
tggggtacttgcctactttttacctggttgttatttga

SEQ ID NO: 3873 - DNA, 38 bp, Artificial Sequence
  Synthetic oligonucleotide
ttggggttaacgttctgatctcgttttcttattattga

SEQ ID NO: 3874 - DNA, 36 bp, Artificial Sequence
  Synthetic oligonucleotide
ggaatgcagcactcgaggttttctttgtttttccca

SEQ ID NO: 3875 - DNA, 38 bp, Artificial Sequence
  Synthetic oligonucleotide
gcgcccaaatccgttgctttgttgttttgtacttttga

SEQ ID NO: 3876 - DNA, 38 bp, Artificial Sequence
  Synthetic oligonucleotide
agtagcctttctctcgatctttgtttgttttttgatga

SEQ ID NO: 3877 - DNA, 38 bp, Artificial Sequence
  Synthetic oligonucleotide
actttcggttgaccatcatatatctctttcttacttga

SEQ ID NO: 3878 - DNA, 35 bp, Artificial Sequence
  Synthetic oligonucleotide
gtcgtaccaatatcggatatcctggtttttctgtc

SEQ ID NO: 3879 - DNA, 38 bp, Artificial Sequence
  Synthetic oligonucleotide
ttactgaacctctccggccctctattttttgaagttga

SEQ ID NO: 3880 - DNA, 35 bp, Artificial Sequence
  Synthetic oligonucleotide
ttttccgtttaattcgatcactttcattgtctcca

SEQ ID NO: 3881 - DNA, 35 bp, Artificial Sequence
  Synthetic oligonucleotide
gcgttgacatgggattctttgtctcttagtctttt

SEQ ID NO: 3882 - DNA, 37 bp, Artificial Sequence
  Synthetic oligonucleotide
agttctattatggctcctaactgttcttgttttccga

SEQ ID NO: 3883 - DNA, 38 bp, Artificial Sequence
  Synthetic oligonucleotide
gctgcactctacacttatggttgtctatcttttactga

SEQ ID NO: 3884 - DNA, 38 bp, Artificial Sequence
  Synthetic oligonucleotide
tgaacgtagcagttttgacatttagtatatctttttga

SEQ ID NO: 3885 - DNA, 35 bp, Artificial Sequence
  Synthetic oligonucleotide
gcggtccgtatgggatttttatttcgttcttgtta

SEQ ID NO: 3886 - DNA, 35 bp, Artificial Sequence
  Synthetic oligonucleotide
ttttaggggtcctgtacattctatccttttatcat

SEQ ID NO: 3887 - DNA, 37 bp, Artificial Sequence
  Synthetic oligonucleotide
ttgtccttccctgttagtctatcatctttcctctgga

SEQ ID NO: 3888 - DNA, 35 bp, Artificial Sequence
  Synthetic oligonucleotide
acgacgccccttttgttgtttttcttggtatcttc

SEQ ID NO: 3889 - DNA, 38 bp, Artificial Sequence
  Synthetic oligonucleotide
gagggccccctatcatattgtttttttatcctccatga

SEQ ID NO: 3890 - DNA, 36 bp, Artificial Sequence
  Synthetic oligonucleotide
tgctgccgtaacactgtttatttctattcttgatta

SEQ ID NO: 3891 - DNA, 37 bp, Artificial Sequence
  Synthetic oligonucleotide
tcgactctggtttgtttttttggtttattacttcgga

SEQ ID NO: 3892 - DNA, 35 bp, Artificial Sequence
  Synthetic oligonucleotide
tgttcaaccggtcccattgttttttgtcgtaatct

SEQ ID NO: 3893 - DNA, 35 bp, Artificial Sequence
  Synthetic oligonucleotide
cacgccttccttttgggttgttgatctcgtttttt

SEQ ID NO: 3894 - DNA, 38 bp, Artificial Sequence
  Synthetic oligonucleotide
aaacgcatttggctcaattgatcttattatttttctga

SEQ ID NO: 3895 - DNA, 36 bp, Artificial Sequence
  Synthetic oligonucleotide
tttaccttgccctggttacgaaatatttgtctctca

SEQ ID NO: 3896 - DNA, 38 bp, Artificial Sequence
  Synthetic oligonucleotide
tataccatcgcttctcatactggggtttatttttttga

SEQ ID NO: 3897 - DNA, 37 bp, Artificial Sequence
  Synthetic oligonucleotide
taaatcgttctcgtaacaccttctatcttttttatga

SEQ ID NO: 3898 - DNA, 35 bp, Artificial Sequence
  Synthetic oligonucleotide
atggatttggccttcactctatgttctcgttttct

SEQ ID NO: 3899 - DNA, 38 bp, Artificial Sequence
  Synthetic oligonucleotide
catcgcatctcgaacgggccttttgttttattatttga

SEQ ID NO: 3900 - DNA, 35 bp, Artificial Sequence
  Synthetic oligonucleotide
gcctttacacatttctgttttgataaagtaattct

SEQ ID NO: 3901 - DNA, 38 bp, Artificial Sequence
  Synthetic oligonucleotide
gtgcgctatctaatgtcaccgtttttttcctcaattga

SEQ ID NO: 3902 - DNA, 37 bp, Artificial Sequence
  Synthetic oligonucleotide
tgtcacgtacctcgtgtttcttttctgttaaacttga

SEQ ID NO: 3903 - DNA, 38 bp, Artificial Sequence
  Synthetic oligonucleotide
aatggaacaaactactttcattttctttctctcattga

SEQ ID NO: 3904 - DNA, 38 bp, Artificial Sequence
  Synthetic oligonucleotide
tttcccaaatctagcttttttcaataatccatatctga

SEQ ID NO: 3905 - DNA, 38 bp, Artificial Sequence
  Synthetic oligonucleotide
ttccatctcaccaatgttggtgactgttgccattttga

SEQ ID NO: 3906 - DNA, 37 bp, Artificial Sequence
  Synthetic oligonucleotide
actcgtgtttttttcgttttgtgcccttcgattctta

SEQ ID NO: 3907 - DNA, 35 bp, Artificial Sequence
  Synthetic oligonucleotide
agtgcccggattagctggctacagtttttttctct

SEQ ID NO: 3908 - DNA, 35 bp, Artificial Sequence
  Synthetic oligonucleotide
aaactccttttttgtatgtcgccatttctttctta

SEQ ID NO: 3909 - DNA, 36 bp, Artificial Sequence
  Synthetic oligonucleotide
tcttggcatgtcctcgttttttgatatctgctttta

SEQ ID NO: 3910 - DNA, 36 bp, Artificial Sequence
  Synthetic oligonucleotide
tgtcgtagtagtgcgcatttgtttaactctctatca

SEQ ID NO: 3911 - DNA, 38 bp, Artificial Sequence
  Synthetic oligonucleotide
tccactgtttacggttttaaattgtttccttgccctga

SEQ ID NO: 3912 - DNA, 38 bp, Artificial Sequence
  Synthetic oligonucleotide
agtccatgcgagctgcatgtactctcggttttttatga

SEQ ID NO: 3913 - DNA, 37 bp, Artificial Sequence
  Synthetic oligonucleotide
gcgtgtttagttaattcgttttttaccaatggggtga

SEQ ID NO: 3914 - DNA, 38 bp, Artificial Sequence
  Synthetic oligonucleotide
agtttcccttccgtttctttctcagtttaactctttga

SEQ ID NO: 3915 - DNA, 38 bp, Artificial Sequence
  Synthetic oligonucleotide
ggtgctccgggcttgtaactttatagttttttccttga

SEQ ID NO: 3916 - DNA, 35 bp, Artificial Sequence
  Synthetic oligonucleotide
gactctttgatctccttgaacgtttttgttatttc

SEQ ID NO: 3917 - DNA, 38 bp, Artificial Sequence
  Synthetic oligonucleotide
tcgtttccaatgatttctcgatttacactccatcttga

SEQ ID NO: 3918 - DNA, 38 bp, Artificial Sequence
  Synthetic oligonucleotide
tttctgtcaacactctcgaacatatatttactccttga

SEQ ID NO: 3919 - DNA, 37 bp, Artificial Sequence
  Synthetic oligonucleotide
acgcggagcggttgtttttttttttgtaatccacaga

SEQ ID NO: 3920 - DNA, 36 bp, Artificial Sequence
  Synthetic oligonucleotide
ttgttaacttttcatctcatctttttcgttacgtga

SEQ ID NO: 3921 - DNA, 38 bp, Artificial Sequence
  Synthetic oligonucleotide
acgttggtgcaaacgttttttgatttctagtattttga

SEQ ID NO: 3922 - DNA, 38 bp, Artificial Sequence
  Synthetic oligonucleotide
tatgccctctaattctgggcttttttttctgttgttga

SEQ ID NO: 3923 - DNA, 38 bp, Artificial Sequence
  Synthetic oligonucleotide
gtttcatcttgttttattagatcttagattttttgtga

SEQ ID NO: 3924 - DNA, 38 bp, Artificial Sequence
  Synthetic oligonucleotide
gcaatgcgatttgtttcgtgtttatcctatctagctga

SEQ ID NO: 3925 - DNA, 38 bp, Artificial Sequence
  Synthetic oligonucleotide
tcgtgcttttctggtagttgaccacactgtttttttga

SEQ ID NO: 3926 - DNA, 38 bp, Artificial Sequence
  Synthetic oligonucleotide
ttccatacgtatatttttttgaaattcgacttttttga

SEQ ID NO: 3927 - DNA, 38 bp, Artificial Sequence
  Synthetic oligonucleotide
acgtttttgacctctagttctgtagcattttgttttga

SEQ ID NO: 3928 - DNA, 38 bp, Artificial Sequence
  Synthetic oligonucleotide
actgaactttttttgtttacgaatccatctattgttga

SEQ ID NO: 3929 - DNA, 38 bp, Artificial Sequence
  Synthetic oligonucleotide
gccgcataggggcaaaattgtttttctctcttacttga

SEQ ID NO: 3930 - DNA, 38 bp, Artificial Sequence
  Synthetic oligonucleotide
accctgggggtttgtaaggctcttttttcgtaatttga

SEQ ID NO: 3931 - DNA, 35 bp, Artificial Sequence
  Synthetic oligonucleotide
agttacataccgtttttcgttacttgaattcaaat

SEQ ID NO: 3932 - DNA, 36 bp, Artificial Sequence
  Synthetic oligonucleotide
acgatcaccacaataatgtctttttttcgttttcta

SEQ ID NO: 3933 - DNA, 36 bp, Artificial Sequence
  Synthetic oligonucleotide
gggactgacatccataatcgggttttttttctagaa

SEQ ID NO: 3934 - DNA, 38 bp, Artificial Sequence
  Synthetic oligonucleotide
atcgggtgcgcccccgaatttttccatgtttttgttga

SEQ ID NO: 3935 - DNA, 37 bp, Artificial Sequence
  Synthetic oligonucleotide
ttttgttacccattttggtccctatcctcactcatga

SEQ ID NO: 3936 - DNA, 36 bp, Artificial Sequence
  Synthetic oligonucleotide
agttggacccgtacgattccctaactttcaacctaa

SEQ ID NO: 3937 - DNA, 36 bp, Artificial Sequence
  Synthetic oligonucleotide
tttctggtctaattatttaaccattctcttgcttta

SEQ ID NO: 3938 - DNA, 38 bp, Artificial Sequence
  Synthetic oligonucleotide
attggcgcctatactgctttgtattgttttcgatttga

SEQ ID NO: 3939 - DNA, 38 bp, Artificial Sequence
  Synthetic oligonucleotide
tcctacaagcaaacggtgaagttgaattttatttttga

SEQ ID NO: 3940 - DNA, 38 bp, Artificial Sequence
  Synthetic oligonucleotide
actgctgactgttttatttgacgataataattttttga

SEQ ID NO: 3941 - DNA, 35 bp, Artificial Sequence
  Synthetic oligonucleotide
tttggtcgtatattctatttttggatgtgaattac

SEQ ID NO: 3942 - DNA, 38 bp, Artificial Sequence
  Synthetic oligonucleotide
tacggtacatggtggagtctcttttgataattttttga

SEQ ID NO: 3943 - DNA, 38 bp, Artificial Sequence
  Synthetic oligonucleotide
ttttgcaatggtgattaatgcggttcgcctgtttttga

SEQ ID NO: 3944 - DNA, 35 bp, Artificial Sequence
  Synthetic oligonucleotide
aggttgcagtccgggatctttattgttaatattta

SEQ ID NO: 3945 - DNA, 36 bp, Artificial Sequence
  Synthetic oligonucleotide
gtttaggctgtcaatggccttttgtttttattttaa

SEQ ID NO: 3946 - DNA, 38 bp, Artificial Sequence
  Synthetic oligonucleotide
aggacttattacattctctgtgttccttatctttatga

SEQ ID NO: 3947 - DNA, 35 bp, Artificial Sequence
  Synthetic oligonucleotide
gctctttcctgtcttgtttatttcgttggttttcc

SEQ ID NO: 3948 - DNA, 35 bp, Artificial Sequence
  Synthetic oligonucleotide
gggttacgtacccgactttttttctggttttctct

SEQ ID NO: 3949 - DNA, 36 bp, Artificial Sequence
  Synthetic oligonucleotide
tcgcaagctaatagctttattttttctgtctttcta

SEQ ID NO: 3950 - DNA, 38 bp, Artificial Sequence
  Synthetic oligonucleotide
ttactatgcatcgtttgaatccgttgtttctccactga

SEQ ID NO: 3951 - DNA, 38 bp, Artificial Sequence
  Synthetic oligonucleotide
tggagtttctgctgctcgacttggtatcctgtttgtga

SEQ ID NO: 3952 - DNA, 38 bp, Artificial Sequence
  Synthetic oligonucleotide
gagtaccgtgtcaacgtttttttttgtattatcaatga

SEQ ID NO: 3953 - DNA, 38 bp, Artificial Sequence
  Synthetic oligonucleotide
tctattaacccgtttacgtgctcacctcgtttttttga

SEQ ID NO: 3954 - DNA, 37 bp, Artificial Sequence
  Synthetic oligonucleotide
gcatgagctcatttgttttatcttgtcgttttttgga

SEQ ID NO: 3955 - DNA, 38 bp, Artificial Sequence
  Synthetic oligonucleotide
ttatctctatactatgttgtttctctatttaccactga

SEQ ID NO: 3956 - DNA, 37 bp, Artificial Sequence
  Synthetic oligonucleotide
tagctcacgacgatttattttctcatttcttatttga

SEQ ID NO: 3957 - DNA, 35 bp, Artificial Sequence
  Synthetic oligonucleotide
ttgcaaggcatccgccttgagttttttttcagttt

SEQ ID NO: 3958 - DNA, 36 bp, Artificial Sequence
  Synthetic oligonucleotide
gcgttgtttcgttatggggtttcttctcacaatgga

SEQ ID NO: 3959 - DNA, 37 bp, Artificial Sequence
  Synthetic oligonucleotide
gcaaatctccttgtttatccatctattcctcttagga

SEQ ID NO: 3960 - DNA, 37 bp, Artificial Sequence
  Synthetic oligonucleotide
gccgtgcttctctttctttttcggttaaatttcttga

SEQ ID NO: 3961 - DNA, 38 bp, Artificial Sequence
  Synthetic oligonucleotide
gtaggcctttgatttctttccttccgtttcttttgtga

SEQ ID NO: 3962 - DNA, 37 bp, Artificial Sequence
  Synthetic oligonucleotide
atctcggtaatctcatcatgggggttgtttattttga

SEQ ID NO: 3963 - DNA, 37 bp, Artificial Sequence
  Synthetic oligonucleotide
gcaggccgttcctcatatttgttgaattggttgttga

SEQ ID NO: 3964 - DNA, 38 bp, Artificial Sequence
  Synthetic oligonucleotide
accgaacttttttcggattcctcggggtttttttttga

SEQ ID NO: 3965 - DNA, 36 bp, Artificial Sequence
  Synthetic oligonucleotide
tggagtactgggcttgtccgtaatttttatgtaaca

SEQ ID NO: 3966 - DNA, 35 bp, Artificial Sequence
  Synthetic oligonucleotide
tccatgtacgtcgatattgacatctttatttttta

SEQ ID NO: 3967 - DNA, 38 bp, Artificial Sequence
  Synthetic oligonucleotide
atgttaggccacgattgttttattgttgatttttttga

SEQ ID NO: 3968 - DNA, 38 bp, Artificial Sequence
  Synthetic oligonucleotide
gcggctcgcattgctttttatttcgtagactatcctga

SEQ ID NO: 3969 - DNA, 38 bp, Artificial Sequence
  Synthetic oligonucleotide
tctacctggatggcgataattttttttgatctttttga

SEQ ID NO: 3970 - DNA, 35 bp, Artificial Sequence
  Synthetic oligonucleotide
gagtgcccattagtaatttttcttccactttattt

SEQ ID NO: 3971 - DNA, 37 bp, Artificial Sequence
  Synthetic oligonucleotide
gagtttccctttttattagtgccttttagttgtttga

SEQ ID NO: 3972 - DNA, 38 bp, Artificial Sequence
  Synthetic oligonucleotide
ccataacacttggaggttctttgtttgttttgttttga

SEQ ID NO: 3973 - DNA, 38 bp, Artificial Sequence
  Synthetic oligonucleotide
ttatttcctctcttaacgttttttactaacctatatga

SEQ ID NO: 3974 - DNA, 37 bp, Artificial Sequence
  Synthetic oligonucleotide
ccgtccgctcctttaatccgttttgtttttctgctga

SEQ ID NO: 3975 - DNA, 35 bp, Artificial Sequence
  Synthetic oligonucleotide
taattggcttttttacttatatttcctcatttgtt

SEQ ID NO: 3976 - DNA, 35 bp, Artificial Sequence
  Synthetic oligonucleotide
tactacaggcctctttcgattttccgggtgttttt

SEQ ID NO: 3977 - DNA, 36 bp, Artificial Sequence
  Synthetic oligonucleotide
gttctgtggttcgttttcttaatgttagtactctca

SEQ ID NO: 3978 - DNA, 37 bp, Artificial Sequence
  Synthetic oligonucleotide
ggctgttttttcttgtatttcggatttaccaatatga

SEQ ID NO: 3979 - DNA, 35 bp, Artificial Sequence
  Synthetic oligonucleotide
gggggactatctactaggctttcgttttttcctct

SEQ ID NO: 3980 - DNA, 35 bp, Artificial Sequence
  Synthetic oligonucleotide
agcaattatgtgcgtttgtttttaatttatgttca

SEQ ID NO: 3981 - DNA, 37 bp, Artificial Sequence
  Synthetic oligonucleotide
ttccacacggtgttgaacatttgttttattgatttga

SEQ ID NO: 3982 - DNA, 36 bp, Artificial Sequence
  Synthetic oligonucleotide
ggtgtcgcttatttttatctttgaattggtcataaa

SEQ ID NO: 3983 - DNA, 36 bp, Artificial Sequence
  Synthetic oligonucleotide
aacttttattgatatacgcatttttttcctgggata

SEQ ID NO: 3984 - DNA, 37 bp, Artificial Sequence
  Synthetic oligonucleotide
catggtcgtttttctgtcctctaaacttactatccga

SEQ ID NO: 3985 - DNA, 38 bp, Artificial Sequence
  Synthetic oligonucleotide
tagtctatggcttggctttccatggtttcctttcttga

SEQ ID NO: 3986 - DNA, 38 bp, Artificial Sequence
  Synthetic oligonucleotide
agcactttcgtcatagtggttattgttgtaaattgtga

SEQ ID NO: 3987 - DNA, 36 bp, Artificial Sequence
  Synthetic oligonucleotide
ttaagcgtacgaccgagtttttatatcatatcttga

SEQ ID NO: 3988 - DNA, 36 bp, Artificial Sequence
  Synthetic oligonucleotide
gctctctctggtataggtttttttttgttatccaca

SEQ ID NO: 3989 - DNA, 36 bp, Artificial Sequence
  Synthetic oligonucleotide
tgcctaggtatatttcgaattttcataggattttca

SEQ ID NO: 3990 - DNA, 37 bp, Artificial Sequence
  Synthetic oligonucleotide
ttcttttttatgatgatccgatcctattttctttcga

SEQ ID NO: 3991 - DNA, 36 bp, Artificial Sequence
  Synthetic oligonucleotide
ttgttttccttgttatgtttaaactgtcaaaatcca

SEQ ID NO: 3992 - DNA, 37 bp, Artificial Sequence
  Synthetic oligonucleotide
tactgcagatattttaagtttctgttaatctttgtga

SEQ ID NO: 3993 - DNA, 35 bp, Artificial Sequence
  Synthetic oligonucleotide
ttctctcaaaatagtttttctttccgcaggatgta

SEQ ID NO: 3994 - DNA, 38 bp, Artificial Sequence
  Synthetic oligonucleotide
ttttagcgtaactggatttttttcacgacgttttctga

SEQ ID NO: 3995 - DNA, 38 bp, Artificial Sequence
  Synthetic oligonucleotide
catgcatggctttctttccatgttctttctatccatga

SEQ ID NO: 3996 - DNA, 36 bp, Artificial Sequence
  Synthetic oligonucleotide
acatgcgaccgttttcttgactttcttcgttattga

SEQ ID NO: 3997 - DNA, 38 bp, Artificial Sequence
  Synthetic oligonucleotide
agctcctgttttccatttcaaatcacgttaatctatga

SEQ ID NO: 3998 - DNA, 38 bp, Artificial Sequence
  Synthetic oligonucleotide
acggcgcctctcctgattttccatcttttctttcctga

SEQ ID NO: 3999 - DNA, 35 bp, Artificial Sequence
  Synthetic oligonucleotide
tcgatatctcttgtttttgttaaattcgtcttcaa

SEQ ID NO: 4000 - DNA, 38 bp, Artificial Sequence
  Synthetic oligonucleotide
ctctgtcccaaatccgtatccattttttcttactctga

SEQ ID NO: 4001 - DNA, 35 bp, Artificial Sequence
  Synthetic oligonucleotide
gtgcttcgctctctgagtttttcatctgtcaattt

SEQ ID NO: 4002 - DNA, 38 bp, Artificial Sequence
  Synthetic oligonucleotide
aagcaacgctgacctttcagactttttttatttgttga

SEQ ID NO: 4003 - DNA, 38 bp, Artificial Sequence
  Synthetic oligonucleotide
actctttctgggggtttttcttcttatagatttcttga

SEQ ID NO: 4004 - DNA, 36 bp, Artificial Sequence
  Synthetic oligonucleotide
ttatggtacactctctattgatgtttttctatctta

SEQ ID NO: 4005 - DNA, 36 bp, Artificial Sequence
  Synthetic oligonucleotide
ccctcaattaattatgcttgtattttgtttctatct

SEQ ID NO: 4006 - DNA, 38 bp, Artificial Sequence
  Synthetic oligonucleotide
ttctcgctgtttgttttcccattatgttacgctattga

SEQ ID NO: 4007 - DNA, 37 bp, Artificial Sequence
  Synthetic oligonucleotide
gaggttttgcgattggattttttggttgttatcttga

SEQ ID NO: 4008 - DNA, 36 bp, Artificial Sequence
  Synthetic oligonucleotide
aacccgtagtagcacaccctgtcgaacccaaataaa

SEQ ID NO: 4009 - DNA, 36 bp, Artificial Sequence
  Synthetic oligonucleotide
aacacttctaggttcgcaaccccttataaccctaaa

SEQ ID NO: 4010 - DNA, 35 bp, Artificial Sequence
  Synthetic oligonucleotide
actccgcaatattccttttaaatttaggttgcaac

SEQ ID NO: 4011 - DNA, 35 bp, Artificial Sequence
  Synthetic oligonucleotide
acttcaacgagcgttgatagctcggattttatcaa

SEQ ID NO: 4012 - DNA, 36 bp, Artificial Sequence
  Synthetic oligonucleotide
tctgcataacaaactcgacacgccctagccccaata

SEQ ID NO: 4013 - DNA, 37 bp, Artificial Sequence
  Synthetic oligonucleotide
gagtacctcatcgcatatcgagcgcactttatacaga

SEQ ID NO: 4014 - DNA, 35 bp, Artificial Sequence
  Synthetic oligonucleotide
accccaataccattgcacctgaggactcaatcaat

SEQ ID NO: 4015 - DNA, 36 bp, Artificial Sequence
  Synthetic oligonucleotide
ttccaccgagttcctttccagccaatatagcatata

SEQ ID NO: 4016 - DNA, 35 bp, Artificial Sequence
  Synthetic oligonucleotide
ctcattcgctaccaaccctgtgatctcttctaaac

SEQ ID NO: 4017 - DNA, 35 bp, Artificial Sequence
  Synthetic oligonucleotide
aactgtcatccgccgactaactcaatctaactaca

SEQ ID NO: 4018 - DNA, 36 bp, Artificial Sequence
  Synthetic oligonucleotide
gagtactggcacgcgataccctaactgtacatcaaa

SEQ ID NO: 4019 - DNA, 37 bp, Artificial Sequence
  Synthetic oligonucleotide
ggctgcacttatctgtaacacatcactattccccaga

SEQ ID NO: 4020 - DNA, 36 bp, Artificial Sequence
  Synthetic oligonucleotide
tatctcaactcttctatatcacatgaccataataaa

SEQ ID NO: 4021 - DNA, 35 bp, Artificial Sequence
  Synthetic oligonucleotide
tgaacacgaaaaaactaagcattaaatcacacacc

SEQ ID NO: 4022 - DNA, 35 bp, Artificial Sequence
  Synthetic oligonucleotide
aattaaccaacaaacccataacgagtccctttatt

SEQ ID NO: 4023 - DNA, 35 bp, Artificial Sequence
  Synthetic oligonucleotide
aatgtaactggcaatttctttctcactgatttctc

SEQ ID NO: 4024 - DNA, 36 bp, Artificial Sequence
  Synthetic oligonucleotide
acaatactgcctccacacttccaccttcttttgtca

SEQ ID NO: 4025 - DNA, 35 bp, Artificial Sequence
  Synthetic oligonucleotide
acactatcaagcgcttcgcatttcctttctccaat

SEQ ID NO: 4026 - DNA, 35 bp, Artificial Sequence
  Synthetic oligonucleotide
acccgtgcggcttaaccttatcttctttatttcat

SEQ ID NO: 4027 - DNA, 35 bp, Artificial Sequence
  Synthetic oligonucleotide
accgctggggctctttccgacaatttcttccattt

SEQ ID NO: 4028 - DNA, 35 bp, Artificial Sequence
  Synthetic oligonucleotide
acgcaaccgtagcaaatttcttagtgttttttttt

SEQ ID NO: 4029 - DNA, 38 bp, Artificial Sequence
  Synthetic oligonucleotide
acgggtcacgccttccactttacttggttttattttga

SEQ ID NO: 4030 - DNA, 36 bp, Artificial Sequence
  Synthetic oligonucleotide
agcagtcattttacttctgttttccttaaaattcta

SEQ ID NO: 4031 - DNA, 38 bp, Artificial Sequence
  Synthetic oligonucleotide
agccagtcacaacttctcgtttcgctctctttttctga

SEQ ID NO: 4032 - DNA, 38 bp, Artificial Sequence
  Synthetic oligonucleotide
agctaccggggtttaccttcctttcttctctcctctga

SEQ ID NO: 4033 - DNA, 38 bp, Artificial Sequence
  Synthetic oligonucleotide
agttggcttgtcatcatttttttgcttatcttctctga

SEQ ID NO: 4034 - DNA, 36 bp, Artificial Sequence
  Synthetic oligonucleotide
atccaaacgatcaccttggtctctctttacttttca

SEQ ID NO: 4035 - DNA, 35 bp, Artificial Sequence
  Synthetic oligonucleotide
atccttatttctatctcatcctcttgtcgccgact

SEQ ID NO: 4036 - DNA, 35 bp, Artificial Sequence
  Synthetic oligonucleotide
atcgaaggtactacgtaaatttctcattctctttt

SEQ ID NO: 4037 - DNA, 35 bp, Artificial Sequence
  Synthetic oligonucleotide
atggtctgtcatggcaccgattacatttctttctc

SEQ ID NO: 4038 - DNA, 35 bp, Artificial Sequence
  Synthetic oligonucleotide
atgtgctcttcgttatttctcttatttctatcttt

SEQ ID NO: 4039 - DNA, 35 bp, Artificial Sequence
  Synthetic oligonucleotide
attacttctgctccattttccttttttcatacatt

SEQ ID NO: 4040 - DNA, 35 bp, Artificial Sequence
  Synthetic oligonucleotide
attcctgcgttgcgtatcttccttcgcttattttc

SEQ ID NO: 4041 - DNA, 37 bp, Artificial Sequence
  Synthetic oligonucleotide
ccccactatttatccgcacatcttttgttctctttga

SEQ ID NO: 4042 - DNA, 35 bp, Artificial Sequence
  Synthetic oligonucleotide
cctccgccttactttcttatttctctttacgaatt

SEQ ID NO: 4043 - DNA, 35 bp, Artificial Sequence
  Synthetic oligonucleotide
cgaggaccgacttttccacttatctttgccctttt

SEQ ID NO: 4044 - DNA, 37 bp, Artificial Sequence
  Synthetic oligonucleotide
ctccatcgaactctatctctttttcttaacaatccga

SEQ ID NO: 4045 - DNA, 36 bp, Artificial Sequence
  Synthetic oligonucleotide
gagtacctcacaattttcccgcgacgccctttttta

SEQ ID NO: 4046 - DNA, 37 bp, Artificial Sequence
  Synthetic oligonucleotide
gatcccgttccttttttaacgctctattttcttttga

SEQ ID NO: 4047 - DNA, 35 bp, Artificial Sequence
  Synthetic oligonucleotide
gcaaatgcctttcattacccattgcttttctgaca

SEQ ID NO: 4048 - DNA, 36 bp, Artificial Sequence
  Synthetic oligonucleotide
gcaatgaacacctacacatacctgcctacacgatta

SEQ ID NO: 4049 - DNA, 36 bp, Artificial Sequence
  Synthetic oligonucleotide
gcaatttttcattcttagggtttctctcacttccca

SEQ ID NO: 4050 - DNA, 38 bp, Artificial Sequence
  Synthetic oligonucleotide
gcacatttcttaacttttctgtttggatttaccaatga

SEQ ID NO: 4051 - DNA, 37 bp, Artificial Sequence
  Synthetic oligonucleotide
gcacggcttacgctcttcttttccgctatctatttga

SEQ ID NO: 4052 - DNA, 36 bp, Artificial Sequence
  Synthetic oligonucleotide
gcagttcgcctccactcactcttttccgatttatca

SEQ ID NO: 4053 - DNA, 35 bp, Artificial Sequence
  Synthetic oligonucleotide
gcatcctcccgtgtcgctcacttttcctttgcttc

SEQ ID NO: 4054 - DNA, 38 bp, Artificial Sequence
  Synthetic oligonucleotide
gccaactttgaatgggctctcatcctatctctctttga

SEQ ID NO: 4055 - DNA, 36 bp, Artificial Sequence
  Synthetic oligonucleotide
gcccgcgctcgcatcctatttcttctttttttgtaa

SEQ ID NO: 4056 - DNA, 35 bp, Artificial Sequence
  Synthetic oligonucleotide
gccctcgtactcttctttggaacttactttcattt

SEQ ID NO: 4057 - DNA, 37 bp, Artificial Sequence
  Synthetic oligonucleotide
gccgcattatttcgttttttcttcactctgcacttga

SEQ ID NO: 4058 - DNA, 38 bp, Artificial Sequence
  Synthetic oligonucleotide
gcctatcttactatatctcgtttactttccttatatga

SEQ ID NO: 4059 - DNA, 37 bp, Artificial Sequence
  Synthetic oligonucleotide
gcctgtacctgtttacttttatcaatcttgtgcttga

SEQ ID NO: 4060 - DNA, 36 bp, Artificial Sequence
  Synthetic oligonucleotide
gccttccgcttggtgttttttttacttttagatcta

SEQ ID NO: 4061 - DNA, 35 bp, Artificial Sequence
  Synthetic oligonucleotide
gcgatggtctaccttcttttaacaaattttcgctc

SEQ ID NO: 4062 - DNA, 38 bp, Artificial Sequence
  Synthetic oligonucleotide
gcgccttacgttaattcacatatccctttaccatctga

SEQ ID NO: 4063 - DNA, 38 bp, Artificial Sequence
  Synthetic oligonucleotide
gcggtctgggaatttctaccctgcttctatctttttga

SEQ ID NO: 4064 - DNA, 35 bp, Artificial Sequence
  Synthetic oligonucleotide
gctacgccttactctctgataatctccactttccg

SEQ ID NO: 4065 - DNA, 35 bp, Artificial Sequence
  Synthetic oligonucleotide
gctatctgagctcccgctttctttcgattatatat

SEQ ID NO: 4066 - DNA, 35 bp, Artificial Sequence
  Synthetic oligonucleotide
ggcccgatttcctatgtcatttggttttttctttc

SEQ ID NO: 4067 - DNA, 35 bp, Artificial Sequence
  Synthetic oligonucleotide
ggccgtcgcatacctagatttctttatcctttttc

SEQ ID NO: 4068 - DNA, 38 bp, Artificial Sequence
  Synthetic oligonucleotide
ggcgccaatttccttctatcgcaattcatttcctctga

SEQ ID NO: 4069 - DNA, 36 bp, Artificial Sequence
  Synthetic oligonucleotide
ggctaggccgccttcttatctttatgcccttgttaa

SEQ ID NO: 4070 - DNA, 35 bp, Artificial Sequence
  Synthetic oligonucleotide
ggcttcttatttgcttgaatatccgcttcctctat

SEQ ID NO: 4071 - DNA, 36 bp, Artificial Sequence
  Synthetic oligonucleotide
gggcacggttttttcttttctggtcgctatccctta

SEQ ID NO: 4072 - DNA, 35 bp, Artificial Sequence
  Synthetic oligonucleotide
ggtaccctgattttttctcgcctattttaatattt

SEQ ID NO: 4073 - DNA, 35 bp, Artificial Sequence
  Synthetic oligonucleotide
ggtccaattacccttttcaacttatcgcaccattt

SEQ ID NO: 4074 - DNA, 36 bp, Artificial Sequence
  Synthetic oligonucleotide
gtttcgtggtatgcgaaccttctattacttatttta

SEQ ID NO: 4075 - DNA, 35 bp, Artificial Sequence
  Synthetic oligonucleotide
gttttcttcccggttaaccctttattttttttggt

SEQ ID NO: 4076 - DNA, 38 bp, Artificial Sequence
  Synthetic oligonucleotide
tacactttctctagttactactcaccttctttctctga

SEQ ID NO: 4077 - DNA, 35 bp, Artificial Sequence
  Synthetic oligonucleotide
tagttacttttaatcaatactctctatttttttgc

SEQ ID NO: 4078 - DNA, 35 bp, Artificial Sequence
  Synthetic oligonucleotide
tatccttcgcattattctttctcatcggtccttta

SEQ ID NO: 4079 - DNA, 35 bp, Artificial Sequence
  Synthetic oligonucleotide
tatctttattgctctgggtgattgcctcttgtttt

SEQ ID NO: 4080 - DNA, 35 bp, Artificial Sequence
  Synthetic oligonucleotide
tatttcccacgctattcatctattctctttacctt

SEQ ID NO: 4081 - DNA, 36 bp, Artificial Sequence
  Synthetic oligonucleotide
tccactggcttggcattgcctccttgatccttctta

SEQ ID NO: 4082 - DNA, 35 bp, Artificial Sequence
  Synthetic oligonucleotide
tccagcacgcaacctcagcttcatctttttctctt

SEQ ID NO: 4083 - DNA, 35 bp, Artificial Sequence
  Synthetic oligonucleotide
tccatttgtactgtgcgcctaattttctactcttt

SEQ ID NO: 4084 - DNA, 35 bp, Artificial Sequence
  Synthetic oligonucleotide
tccgacctggttatttttttgcctttttctattat

SEQ ID NO: 4085 - DNA, 36 bp, Artificial Sequence
  Synthetic oligonucleotide
tcgcgatttcccatgtctctatacttcttacaccca

SEQ ID NO: 4086 - DNA, 35 bp, Artificial Sequence
  Synthetic oligonucleotide
tcgtacgagatgcactctttctacttaagttttct

SEQ ID NO: 4087 - DNA, 37 bp, Artificial Sequence
  Synthetic oligonucleotide
tcgtcattgccttcctttttcatgtttcattttctga

SEQ ID NO: 4088 - DNA, 35 bp, Artificial Sequence
  Synthetic oligonucleotide
tcgtgatctctatttggtttcttccacgcatttct

SEQ ID NO: 4089 - DNA, 36 bp, Artificial Sequence
  Synthetic oligonucleotide
tcgttctatccgtttgtgcatcttccttctttacca

SEQ ID NO: 4090 - DNA, 35 bp, Artificial Sequence
  Synthetic oligonucleotide
tctaggcatctccgcttcctaaatttctttctgta

SEQ ID NO: 4091 - DNA, 35 bp, Artificial Sequence
  Synthetic oligonucleotide
tctgcccgcactactaaatttttatctcttcacta

SEQ ID NO: 4092 - DNA, 36 bp, Artificial Sequence
  Synthetic oligonucleotide
tctttagcatctcatcttttctgccctcacgcctta

SEQ ID NO: 4093 - DNA, 35 bp, Artificial Sequence
  Synthetic oligonucleotide
tgcacgaggattaccttttctttttctcgattctt

SEQ ID NO: 4094 - DNA, 36 bp, Artificial Sequence
  Synthetic oligonucleotide
tgcttatcccgggaatatcctttgctctcttttcca

SEQ ID NO: 4095 - DNA, 38 bp, Artificial Sequence
  Synthetic oligonucleotide
tggctctcacgtctccattttattttctatttttctga

SEQ ID NO: 4096 - DNA, 37 bp, Artificial Sequence
  Synthetic oligonucleotide
tggggcttaaccatctcttctttctcttttaccagga

SEQ ID NO: 4097 - DNA, 36 bp, Artificial Sequence
  Synthetic oligonucleotide
tggtactaacctctatctcatcctaaaatctcttta

SEQ ID NO: 4098 - DNA, 35 bp, Artificial Sequence
  Synthetic oligonucleotide
tgtcgacctttaccttattcatttgaaatcgcttt

SEQ ID NO: 4099 - DNA, 36 bp, Artificial Sequence
  Synthetic oligonucleotide
ttccttgcaatttcctttctttttattcatccggca

SEQ ID NO: 4100 - DNA, 37 bp, Artificial Sequence
  Synthetic oligonucleotide
ttcgacccttttccatactttttctcacgcaaattga

SEQ ID NO: 4101 - DNA, 38 bp, Artificial Sequence
  Synthetic oligonucleotide
ttctcgatcctttgccgcatttctcacttttctgttga

SEQ ID NO: 4102 - DNA, 36 bp, Artificial Sequence
  Synthetic oligonucleotide
ttctcgtagctacaaatcctttaacacttctcttca

SEQ ID NO: 4103 - DNA, 38 bp, Artificial Sequence
  Synthetic oligonucleotide
ttgcgacgcctctactttcaccccactaaaatttctga

SEQ ID NO: 4104 - DNA, 35 bp, Artificial Sequence
  Synthetic oligonucleotide
ttgtacgttcgctttattttgcattccgccttttt

SEQ ID NO: 4105 - DNA, 37 bp, Artificial Sequence
  Synthetic oligonucleotide
tttcctcgctatttctgtctctttgcccttcttggga

SEQ ID NO: 4106 - DNA, 37 bp, Artificial Sequence
  Synthetic oligonucleotide
ttttcaggtacgaccccatacttttttttcattttga

SEQ ID NO: 4107 - DNA, 35 bp, Artificial Sequence
  Synthetic oligonucleotide
aacgccgtacagttgctgatttcacccactctttt

SEQ ID NO: 4108 - DNA, 35 bp, Artificial Sequence
  Synthetic oligonucleotide
actccttctaaaattacacttatatcacccatacc

SEQ ID NO: 4109 - DNA, 35 bp, Artificial Sequence
  Synthetic oligonucleotide
agaaccgtccctgcatttttattggttattttttt

SEQ ID NO: 4110 - DNA, 38 bp, Artificial Sequence
  Synthetic oligonucleotide
cttgcatattgttcttcctgtttgctttttcttcttga

SEQ ID NO: 4111 - DNA, 35 bp, Artificial Sequence
  Synthetic oligonucleotide
gagtaccctattacgctccccccccattatctctt

SEQ ID NO: 4112 - DNA, 38 bp, Artificial Sequence
  Synthetic oligonucleotide
gcaccttctattttcaccccgatttaccctttgcctga

SEQ ID NO: 4113 - DNA, 38 bp, Artificial Sequence
  Synthetic oligonucleotide
gccgccttgggtccattattatctttatatttttctga

SEQ ID NO: 4114 - DNA, 38 bp, Artificial Sequence
  Synthetic oligonucleotide
gccgcttgcctttatttatcatacgctattaatcttga

SEQ ID NO: 4115 - DNA, 35 bp, Artificial Sequence
  Synthetic oligonucleotide
gcctggttatctttgaatagctttcgtattccttt

SEQ ID NO: 4116 - DNA, 36 bp, Artificial Sequence
  Synthetic oligonucleotide
gccttgcatcttcacttatggtgtcttaccacttta

SEQ ID NO: 4117 - DNA, 35 bp, Artificial Sequence
  Synthetic oligonucleotide
gcgaggctattatctctggcgctgttcgcccactt

SEQ ID NO: 4118 - DNA, 37 bp, Artificial Sequence
  Synthetic oligonucleotide
gctagcatgcactcctttacttcttctcatcacacga

SEQ ID NO: 4119 - DNA, 37 bp, Artificial Sequence
  Synthetic oligonucleotide
gttcaacttatcttcctttttctttctgggactggga

SEQ ID NO: 4120 - DNA, 35 bp, Artificial Sequence
  Synthetic oligonucleotide
taccgctccactcttctttattttcggtatctttc

SEQ ID NO: 4121 - DNA, 35 bp, Artificial Sequence
  Synthetic oligonucleotide
tctagccgtcactattcttcgtacgtttccatcct

SEQ ID NO: 4122 - DNA, 38 bp, Artificial Sequence
  Synthetic oligonucleotide
tctcactactcgctctttttccttttctccacttatga

SEQ ID NO: 4123 - DNA, 35 bp, Artificial Sequence
  Synthetic oligonucleotide
tcttacctaatttcttactctgccactttacacgc

SEQ ID NO: 4124 - DNA, 38 bp, Artificial Sequence
  Synthetic oligonucleotide
tggtacgtactcgcgccgcggtctttttcttttcctga

SEQ ID NO: 4125 - DNA, 36 bp, Artificial Sequence
  Synthetic oligonucleotide
ttttacttacccataatttccttacattactttata

SEQ ID NO: 4126 - DNA, 36 bp, Artificial Sequence
  Synthetic oligonucleotide
aaatagctcgcacgagtagccccgatagaaacataa

SEQ ID NO: 4127 - DNA, 37 bp, Artificial Sequence
  Synthetic oligonucleotide
aatcaaatcatacaatagagaccgaaattacaaccga

SEQ ID NO: 4128 - DNA, 36 bp, Artificial Sequence
  Synthetic oligonucleotide
acaggcttggttcaacgaaaatcttcagttccggaa

SEQ ID NO: 4129 - DNA, 35 bp, Artificial Sequence
  Synthetic oligonucleotide
accctggggtgtccgggataaaaatatacaaatca

SEQ ID NO: 4130 - DNA, 36 bp, Artificial Sequence
  Synthetic oligonucleotide
agagaataaaatgggggctagaagctaaaaatataa

SEQ ID NO: 4131 - DNA, 38 bp, Artificial Sequence
  Synthetic oligonucleotide
cgtgcacattctaacggaatcagtaccacacaccatga

SEQ ID NO: 4132 - DNA, 35 bp, Artificial Sequence
  Synthetic oligonucleotide
ctgcttaaaactatcccataatcctaatgaccgga

SEQ ID NO: 4133 - DNA, 36 bp, Artificial Sequence
  Synthetic oligonucleotide
gaatgatttacaccacaattagactactgatatcaa

SEQ ID NO: 4134 - DNA, 37 bp, Artificial Sequence
  Synthetic oligonucleotide
gagttgctgcaagggactccctgaacacttatgacga

SEQ ID NO: 4135 - DNA, 37 bp, Artificial Sequence
  Synthetic oligonucleotide
gcgccgaatagttcgacccgaaaccctaatgaatcga

SEQ ID NO: 4136 - DNA, 38 bp, Artificial Sequence
  Synthetic oligonucleotide
gggctgtgcaaacacaatatataaaaactcaacattga

SEQ ID NO: 4137 - DNA, 35 bp, Artificial Sequence
  Synthetic oligonucleotide
ggtctgcccctgaccgactcaaccgattaagaaca

SEQ ID NO: 4138 - DNA, 35 bp, Artificial Sequence
  Synthetic oligonucleotide
taaaacgaaactaggaaagatacacctaaaaagaa

SEQ ID NO: 4139 - DNA, 35 bp, Artificial Sequence
  Synthetic oligonucleotide
tactaacaacgggtagaccgacgaatacccacaca

SEQ ID NO: 4140 - DNA, 38 bp, Artificial Sequence
  Synthetic oligonucleotide
tactggagggctacaacctgctacatagatacacatga

SEQ ID NO: 4141 - DNA, 37 bp, Artificial Sequence
  Synthetic oligonucleotide
tataacgccctaacatattgactacgagagactggga

SEQ ID NO: 4142 - DNA, 36 bp, Artificial Sequence
  Synthetic oligonucleotide
tcaatatcccgtcctcggggctagttatagtctaaa

SEQ ID NO: 4143 - DNA, 37 bp, Artificial Sequence
  Synthetic oligonucleotide
tcccataataaaccctatcaagtgtagacaaacatga

SEQ ID NO: 4144 - DNA, 37 bp, Artificial Sequence
  Synthetic oligonucleotide
tcgaacccgccacaaaatacttaagtcagtcaacaga

SEQ ID NO: 4145 - DNA, 35 bp, Artificial Sequence
  Synthetic oligonucleotide
tcgcattcccgacaaaatatatactggactacttc

SEQ ID NO: 4146 - DNA, 36 bp, Artificial Sequence
  Synthetic oligonucleotide
tgaaccgttatattaccaaattagagcttagaaata

SEQ ID NO: 4147 - DNA, 38 bp, Artificial Sequence
  Synthetic oligonucleotide
tgacatactataaccggggccattaataatacacatga

SEQ ID NO: 4148 - DNA, 36 bp, Artificial Sequence
  Synthetic oligonucleotide
tgcaacgtaaaacacacaaactctaatgataccgga

SEQ ID NO: 4149 - DNA, 36 bp, Artificial Sequence
  Synthetic oligonucleotide
tgcgacaacagccattcgggaactacccgatcacca

SEQ ID NO: 4150 - DNA, 36 bp, Artificial Sequence
  Synthetic oligonucleotide
ttccggctataatacaaacatatcacccgacttgaa

SEQ ID NO: 4151 - DNA, 37 bp, Artificial Sequence
  Synthetic oligonucleotide
gtcacaccgcagctcagacccccagacattctgtcaa

SEQ ID NO: 4152 - DNA, 35 bp, Artificial Sequence
  Synthetic oligonucleotide
tactgaccccgaaacctgccggaccccgtccactg

SEQ ID NO: 4153 - DNA, 37 bp, Artificial Sequence
  Synthetic oligonucleotide
gcacgaaccccaactactgaccccgcctcgaaccgga

SEQ ID NO: 4154 - DNA, 38 bp, Artificial Sequence
  Synthetic oligonucleotide
tgactagcggcagtccctcaacatggccgtccctttga

SEQ ID NO: 4155 - DNA, 35 bp, Artificial Sequence
  Synthetic oligonucleotide
gccctgccgccgactatctactgaccccgcaatcc

SEQ ID NO: 4156 - DNA, 36 bp, Artificial Sequence
  Synthetic oligonucleotide
tacaccctgcccactgaccccgaccacttgttgcaa

SEQ ID NO: 4157 - DNA, 35 bp, Artificial Sequence
  Synthetic oligonucleotide
actgcctcccgtcgaagtataaagttagaccggta

SEQ ID NO: 4158 - DNA, 37 bp, Artificial Sequence
  Synthetic oligonucleotide
tcaccccgcacctataattatgaccccgacctgccga

SEQ ID NO: 4159 - DNA, 35 bp, Artificial Sequence
  Synthetic oligonucleotide
gctgcaacccattgcaccgtgactcccaaggcacc

SEQ ID NO: 4160 - DNA, 35 bp, Artificial Sequence
  Synthetic oligonucleotide
tgcgaccggtagggagaccccggtgtcctatgagt

SEQ ID NO: 4161 - DNA, 35 bp, Artificial Sequence
  Synthetic oligonucleotide
aacccaaccccgactccttcgaccccgtccagtac

SEQ ID NO: 4162 - DNA, 37 bp, Artificial Sequence
  Synthetic oligonucleotide
tgcactgaccccgcaccttacgttaacgacgccccga

SEQ ID NO: 4163 - DNA, 35 bp, Artificial Sequence
  Synthetic oligonucleotide
tacgactccgaccccgactcctatgcaccctgacc

SEQ ID NO: 4164 - DNA, 35 bp, Artificial Sequence
  Synthetic oligonucleotide
tcacactcaggcatatctcctactgaccccgaacc

SEQ ID NO: 4165 - DNA, 36 bp, Artificial Sequence
  Synthetic oligonucleotide
acacgaaccaggcaaccccgactacactgaccccga

SEQ ID NO: 4166 - DNA, 35 bp, Artificial Sequence
  Synthetic oligonucleotide
cacgcaaacgacctgccgctagtgattagaacacg

SEQ ID NO: 4167 - DNA, 37 bp, Artificial Sequence
  Synthetic oligonucleotide
attcacgccggtcggcctcccgtcgattgtcgaggga

SEQ ID NO: 4168 - DNA, 35 bp, Artificial Sequence
  Synthetic oligonucleotide
accccgaaaaaccagaccccgacctatgagatcga

SEQ ID NO: 4169 - DNA, 36 bp, Artificial Sequence
  Synthetic oligonucleotide
agaggcggtcagtctctcaacatggcagtcacgtga

SEQ ID NO: 4170 - DNA, 36 bp, Artificial Sequence
  Synthetic oligonucleotide
gttgccacccagaccccgtcaactaaccccgttcta

SEQ ID NO: 4171 - DNA, 35 bp, Artificial Sequence
  Synthetic oligonucleotide
gccagagcccaaccccgcactagacaatccccctg

SEQ ID NO: 4172 - DNA, 36 bp, Artificial Sequence
  Synthetic oligonucleotide
tgcacccacgtagtgcaccactgaccccgatattta

SEQ ID NO: 4173 - DNA, 38 bp, Artificial Sequence
  Synthetic oligonucleotide
acatgccggcctcccgtcgattgtatcagtgaccctga

SEQ ID NO: 4174 - DNA, 35 bp, Artificial Sequence
  Synthetic oligonucleotide
acgcgctcaccccctgacagttacgaaaggcttta

SEQ ID NO: 4175 - DNA, 38 bp, Artificial Sequence
  Synthetic oligonucleotide
gacgcacgtcgcgtagtgcagcacgttcagtcaattga

SEQ ID NO: 4176 - DNA, 35 bp, Artificial Sequence
  Synthetic oligonucleotide
tgtagcgcaagacccccagacagtccacgcggaca

SEQ ID NO: 4177 - DNA, 35 bp, Artificial Sequence
  Synthetic oligonucleotide
accgactccactatcgcctaccgaccccgtgccgc

SEQ ID NO: 4178 - DNA, 32 bp, Artificial Sequence
  Synthetic oligonucleotide
gcaccactgaccccgattcgactttacgctga

SEQ ID NO: 4179 - DNA, 36 bp, Artificial Sequence
  Synthetic oligonucleotide
atcgtgcgaagacccccagacattagactatactaa

SEQ ID NO: 4180 - DNA, 36 bp, Artificial Sequence
  Synthetic oligonucleotide
accaccaccccgtagccctaccaccccgtccgcaca

SEQ ID NO: 4181 - DNA, 35 bp, Artificial Sequence
  Synthetic oligonucleotide
gcccggaccacgttacagacccccagacgcgtgag

SEQ ID NO: 4182 - DNA, 35 bp, Artificial Sequence
  Synthetic oligonucleotide
accgctcgaacctgatctacactgaccccgaaacc

SEQ ID NO: 4183 - DNA, 35 bp, Artificial Sequence
  Synthetic oligonucleotide
taccgaacacgcttcacctgaccccgtctctgacc

SEQ ID NO: 4184 - DNA, 36 bp, Artificial Sequence
  Synthetic oligonucleotide
gcccaggccagaaagacccccagaccgtaaccctca

SEQ ID NO: 4185 - DNA, 36 bp, Artificial Sequence
  Synthetic oligonucleotide
gaatgcaacatccagaccccgcaccattcaaatcga

SEQ ID NO: 4186 - DNA, 36 bp, Artificial Sequence
  Synthetic oligonucleotide
accaacccaaccccgctcacttctcttgagacagaa

SEQ ID NO: 4187 - DNA, 36 bp, Artificial Sequence
  Synthetic oligonucleotide
gagccgtcaaaggcacatgtcagacccccagaccaa

SEQ ID NO: 4188 - DNA, 38 bp, Artificial Sequence
  Synthetic oligonucleotide
gtggtgcaccaatgggggtccatttcgaaagggcttga

SEQ ID NO: 4189 - DNA, 35 bp, Artificial Sequence
  Synthetic oligonucleotide
acccacggggccactccgaattaatccggatgcac

SEQ ID NO: 4190 - DNA, 35 bp, Artificial Sequence
  Synthetic oligonucleotide
cacacggactgcaatagattcagtgtctatgactg

SEQ ID NO: 4191 - DNA, 36 bp, Artificial Sequence
  Synthetic oligonucleotide
tacgccccccgtcgatttgggatgagctgcaattca

SEQ ID NO: 4192 - DNA, 38 bp, Artificial Sequence
  Synthetic oligonucleotide
gagcctcccgtcgatgggtagatggaacccatgcatga

SEQ ID NO: 4193 - DNA, 35 bp, Artificial Sequence
  Synthetic oligonucleotide
tcaacgcaccacataccgaccccgatacattcacc

SEQ ID NO: 4194 - DNA, 38 bp, Artificial Sequence
  Synthetic oligonucleotide
gcaacgagtctaccctcccgttccaagctggaacgtga

SEQ ID NO: 4195 - DNA, 36 bp, Artificial Sequence
  Synthetic oligonucleotide
tgtcaacgacaaatccatctcactgaccccgcttta

SEQ ID NO: 4196 - DNA, 38 bp, Artificial Sequence
  Synthetic oligonucleotide
atcacggtcgtgccttcagattccgaacgtgagtctga

SEQ ID NO: 4197 - DNA, 35 bp, Artificial Sequence
  Synthetic oligonucleotide
gaagcctaggctgacttcaacccccagaccacatc

SEQ ID NO: 4198 - DNA, 36 bp, Artificial Sequence
  Synthetic oligonucleotide
gccgatggtacgtcagacccccagacagaacgggga

SEQ ID NO: 4199 - DNA, 35 bp, Artificial Sequence
  Synthetic oligonucleotide
tgtcacccggaagacccccagaaagtcgatagtaa

SEQ ID NO: 4200 - DNA, 36 bp, Artificial Sequence
  Synthetic oligonucleotide
gcccccgatcacactgcaacgtcacagaaccccgca

SEQ ID NO: 4201 - DNA, 38 bp, Artificial Sequence
  Synthetic oligonucleotide
actgaccccgctatcagactccgctctacgccgattga

SEQ ID NO: 4202 - DNA, 35 bp, Artificial Sequence
  Synthetic oligonucleotide
gtccggagacaagcgttgcccatgtgtgttactac

SEQ ID NO: 4203 - DNA, 35 bp, Artificial Sequence
  Synthetic oligonucleotide
accaagcccgccacttcaaaaacccctcactgacc

SEQ ID NO: 4204 - DNA, 38 bp, Artificial Sequence
  Synthetic oligonucleotide
actgaccccgacgcatcgcttaaccccgacgtcgttga

SEQ ID NO: 4205 - DNA, 37 bp, Artificial Sequence
  Synthetic oligonucleotide
aacgcatgggtgcgggaagatattgggatatcatcga

SEQ ID NO: 4206 - DNA, 35 bp, Artificial Sequence
  Synthetic oligonucleotide
gcccccacacagaccccgcataacacaaaacgatg

SEQ ID NO: 4207 - DNA, 36 bp, Artificial Sequence
  Synthetic oligonucleotide
accacactgaccccgaaatatgacgcgccaggatga

SEQ ID NO: 4208 - DNA, 37 bp, Artificial Sequence
  Synthetic oligonucleotide
acatgcctactgaccccgaacttaccgagatagtgga

SEQ ID NO: 4209 - DNA, 37 bp, Artificial Sequence
  Synthetic oligonucleotide
agacgaggcggacccccagacagatcgctagaataca

SEQ ID NO: 4210 - DNA, 37 bp, Artificial Sequence
  Synthetic oligonucleotide
tgcaagggtggatggtatcgaaccgcagttccagaga

SEQ ID NO: 4211 - DNA, 35 bp, Artificial Sequence
  Synthetic oligonucleotide
aacccacatcgcgcaggccatcaccgaccccgtac

SEQ ID NO: 4212 - DNA, 35 bp, Artificial Sequence
  Synthetic oligonucleotide
accctgccgccgatctactctgaccccgcactttt

SEQ ID NO: 4213 - DNA, 36 bp, Artificial Sequence
  Synthetic oligonucleotide
gctacgacactgactccatgttttcctgaccccgta

SEQ ID NO: 4214 - DNA, 35 bp, Artificial Sequence
  Synthetic oligonucleotide
gcacaacggtcactcaccgaccccgactcttgacc

SEQ ID NO: 4215 - DNA, 34 bp, Artificial Sequence
  Synthetic oligonucleotide
gccctaaccccgccatgtccggaccccgtatacc

SEQ ID NO: 4216 - DNA, 35 bp, Artificial Sequence
  Synthetic oligonucleotide
gttggcgaaatgcttactgaccccgtaccctagcc

SEQ ID NO: 4217 - DNA, 35 bp, Artificial Sequence
  Synthetic oligonucleotide
gagtcggtcgtgaatgaaacaggaaccattctttg

SEQ ID NO: 4218 - DNA, 35 bp, Artificial Sequence
  Synthetic oligonucleotide
tgagtagaggcggacccccagacaagctgctagta

SEQ ID NO: 4219 - DNA, 37 bp, Artificial Sequence
  Synthetic oligonucleotide
ttagccccaggtaatccccagacggccgaaggtggga

SEQ ID NO: 4220 - DNA, 38 bp, Artificial Sequence
  Synthetic oligonucleotide
atgcctgcgatcagacccccagatcctcatgccaatga

SEQ ID NO: 4221 - DNA, 36 bp, Artificial Sequence
  Synthetic oligonucleotide
gccgatagaccccgcacctgaatcaccgaccccgaa

SEQ ID NO: 4222 - DNA, 37 bp, Artificial Sequence
  Synthetic oligonucleotide
gacggagtcacggacgcatgattgatcggagaattga

SEQ ID NO: 4223 - DNA, 36 bp, Artificial Sequence
  Synthetic oligonucleotide
gcacgccttagctgcttacccatactgaccccgcca

SEQ ID NO: 4224 - DNA, 36 bp, Artificial Sequence
  Synthetic oligonucleotide
gacactgaccccgcaccccacacgtacgatatcgta

SEQ ID NO: 4225 - DNA, 36 bp, Artificial Sequence
  Synthetic oligonucleotide
tagagccccagcacttaaacggatagatcccaatga

SEQ ID NO: 4226 - DNA, 35 bp, Artificial Sequence
  Synthetic oligonucleotide
gaatcggagcggcatcaccttgtggtcagtgcctt

SEQ ID NO: 4227 - DNA, 38 bp, Artificial Sequence
  Synthetic oligonucleotide
aagtcacgtcaaatgcgagttgtttgcttccgacgtga

SEQ ID NO: 4228 - DNA, 35 bp, Artificial Sequence
  Synthetic oligonucleotide
taacacccgcaaccagtacaatcttaagattaccg

SEQ ID NO: 4229 - DNA, 36 bp, Artificial Sequence
  Synthetic oligonucleotide
acccttacgccggacggttgcaaggacccccagaca

SEQ ID NO: 4230 - DNA, 35 bp, Artificial Sequence
  Synthetic oligonucleotide
gctcgcgaggaggccactgaccccgatattcctta

SEQ ID NO: 4231 - DNA, 37 bp, Artificial Sequence
  Synthetic oligonucleotide
tgaggccgagcaaatcacggactagcctggtggcaga

SEQ ID NO: 4232 - DNA, 34 bp, Artificial Sequence
  Synthetic oligonucleotide
gccacgtaaacggccccaatactgaccccgcaca

SEQ ID NO: 4233 - DNA, 36 bp, Artificial Sequence
  Synthetic oligonucleotide
tccatccccgcatcaggcgcactgaccccgttgtaa

SEQ ID NO: 4234 - DNA, 37 bp, Artificial Sequence
  Synthetic oligonucleotide
gagcctgccccatcgaaactgaccccgaatcctacga

SEQ ID NO: 4235 - DNA, 36 bp, Artificial Sequence
  Synthetic oligonucleotide
tccgtgaggccatagcggaagaccccctgacatcga

SEQ ID NO: 4236 - DNA, 36 bp, Artificial Sequence
  Synthetic oligonucleotide
tactgaccccgcaaattccccaacatacggtcgtca

SEQ ID NO: 4237 - DNA, 35 bp, Artificial Sequence
  Synthetic oligonucleotide
gccctgccgccgactatctactgaccccgcaatac

SEQ ID NO: 4238 - DNA, 35 bp, Artificial Sequence
  Synthetic oligonucleotide
acagagcactcactacacaggaatccagaccccgc

SEQ ID NO: 4239 - DNA, 35 bp, Artificial Sequence
  Synthetic oligonucleotide
ggtggaggggggtagggttggtcggtaaggcgcgc

SEQ ID NO: 4240 - DNA, 38 bp, Artificial Sequence
  Synthetic oligonucleotide
tacgcgacgagccgattccactgaccccgcacccatga

SEQ ID NO: 4241 - DNA, 35 bp, Artificial Sequence
  Synthetic oligonucleotide
actgaccccgatctttgttctaaaccaattcacta

SEQ ID NO: 4242 - DNA, 35 bp, Artificial Sequence
  Synthetic oligonucleotide
gcacaccatccactgaccccgttagccctcttgca

SEQ ID NO: 4243 - DNA, 35 bp, Artificial Sequence
  Synthetic oligonucleotide
tcacgcccgtctcccaatttgtcgtctactcctcg

SEQ ID NO: 4244 - DNA, 36 bp, Artificial Sequence
  Synthetic oligonucleotide
gactgaccccgtgcaaaaaaccccgagtaatcctca

SEQ ID NO: 4245 - DNA, 35 bp, Artificial Sequence; identical to SEQ ID NO: 201
  Synthetic oligonucleotide

SEQ ID NO: 4246 - DNA, 36 bp, Artificial Sequence
  Synthetic oligonucleotide
tcccaccacaccaaccatatactgaccccgcataaa

SEQ ID NO: 4247 - DNA, 37 bp, Artificial Sequence
  Synthetic oligonucleotide
tgatgtccagggggtaaaatacatgtcgctgtcaaga

SEQ ID NO: 4248 - DNA, 37 bp, Artificial Sequence
  Synthetic oligonucleotide
tgaacgaagctgacccggtgtcactatagtgttacga

SEQ ID NO: 4249 - DNA, 38 bp, Artificial Sequence
  Synthetic oligonucleotide
tcgcgagtcggacccccagacagatcaggagggagtga

SEQ ID NO: 4250 - DNA, 37 bp, Artificial Sequence
  Synthetic oligonucleotide
gtcacaccgcagctcagacccccagacattctgtcca

SEQ ID NO: 4251 - DNA, 36 bp, Artificial Sequence
  Synthetic oligonucleotide
cagtgcgcatcggtgtgactcgtgacacgtgtttca

SEQ ID NO: 4252 - DNA, 35 bp, Artificial Sequence
  Synthetic oligonucleotide
taccacgacaatcctgggagtttgtttcgtcacta

SEQ ID NO: 4253 - DNA, 35 bp, Artificial Sequence
  Synthetic oligonucleotide
cctgtcatagcttacctgactctacttggaaatgt

SEQ ID NO: 4254 - DNA, 35 bp, Artificial Sequence
  Synthetic oligonucleotide
gctgcaacccattgcaccgtgactcccaaggcaac

SEQ ID NO: 4255 - DNA, 37 bp, Artificial Sequence
  Synthetic oligonucleotide
gtgaggcccgtgcagacccccagacagttactgcgga

SEQ ID NO: 4256 - DNA, 37 bp, Artificial Sequence
  Synthetic oligonucleotide
gccaaactactgaccccgaactgagacttaagattga

SEQ ID NO: 4257 - DNA, 37 bp, Artificial Sequence
  Synthetic oligonucleotide
taggacgcttactgaccccgaatacatacaccacgga

SEQ ID NO: 4258 - DNA, 35 bp, Artificial Sequence
  Synthetic oligonucleotide
gcactgaccccgaaattattttaaacagcatccat

SEQ ID NO: 4259 - DNA, 36 bp, Artificial Sequence
  Synthetic oligonucleotide
gagcccccgtgccaactgcagacctgaccccgctta

SEQ ID NO: 4260 - DNA, 36 bp, Artificial Sequence
  Synthetic oligonucleotide
tcacaaacgttcacactgaccccgaataaaccgtaa

SEQ ID NO: 4261 - DNA, 35 bp, Artificial Sequence
  Synthetic oligonucleotide
gacccaccgaccccgctttttgacttagccaagtc

SEQ ID NO: 4262 - DNA, 35 bp, Artificial Sequence
  Synthetic oligonucleotide
tccacggtccatccgcgatatccggtaggaccact

SEQ ID NO: 4263 - DNA, 36 bp, Artificial Sequence
  Synthetic oligonucleotide
tgacggagtgtgacatacacgtagtacccggggtca

SEQ ID NO: 4264 - DNA, 38 bp, Artificial Sequence
  Synthetic oligonucleotide
agggggacagtaagagaaggcttccgtgaaacaaatga

SEQ ID NO: 4265 - DNA, 38 bp, Artificial Sequence
  Synthetic oligonucleotide
agcgatgtccatgacccccgatactgaccccgacctga

SEQ ID NO: 4266 - DNA, 35 bp, Artificial Sequence
  Synthetic oligonucleotide
gccacccccaggtaatagacacgtcccaacgtgat

SEQ ID NO: 4267 - DNA, 37 bp, Artificial Sequence
  Synthetic oligonucleotide
aggacgaggatcagggtcgcataagtttgtagcagga

SEQ ID NO: 4268 - DNA, 36 bp, Artificial Sequence
  Synthetic oligonucleotide
acagtcaggctacaaattttaccgaccccgaaacca

SEQ ID NO: 4269 - DNA, 36 bp, Artificial Sequence
  Synthetic oligonucleotide
gccgttcagacccccgacacgcctcgaattgaggaa

SEQ ID NO: 4270 - DNA, 35 bp, Artificial Sequence
  Synthetic oligonucleotide
acccactgaccccgcgcgctgtttccaaacagctt

SEQ ID NO: 4271 - DNA, 36 bp, Artificial Sequence
  Synthetic oligonucleotide
ggagagcgggagggtgggtcataaacgccactgaga

SEQ ID NO: 4272 - DNA, 38 bp, Artificial Sequence
  Synthetic oligonucleotide
tgctaccccgaacgaacctggtgtcacatgtaacatga

SEQ ID NO: 4273 - DNA, 35 bp, Artificial Sequence
  Synthetic oligonucleotide
ggagaagccgaagcggcattgcctcgtggtttacg

SEQ ID NO: 4274 - DNA, 36 bp, Artificial Sequence
  Synthetic oligonucleotide
tcaacggagatgccatgccgttcgatcccggtgtca

SEQ ID NO: 4275 - DNA, 38 bp, Artificial Sequence
  Synthetic oligonucleotide
tgatggggggaaggacaatggtgttggtggtagtgtga

SEQ ID NO: 4276 - DNA, 36 bp, Artificial Sequence
  Synthetic oligonucleotide
tactgaccccgatacattacagtctgtctttgtgga

SEQ ID NO: 4277 - DNA, 35 bp, Artificial Sequence
  Synthetic oligonucleotide
gcacccgttcatactcctctaactgaccccgcatt

SEQ ID NO: 4278 - DNA, 35 bp, Artificial Sequence
  Synthetic oligonucleotide
gcgacgcacaggtgccataccgaccccgctacacc

SEQ ID NO: 4279 - DNA, 35 bp, Artificial Sequence
  Synthetic oligonucleotide
actgaccccgggcactagtgcatcgtgtaaacgcc

SEQ ID NO: 4280 - DNA, 35 bp, Artificial Sequence
  Synthetic oligonucleotide
agcgaagacccccagacagttggtgccaaggaact

SEQ ID NO: 4281 - DNA, 35 bp, Artificial Sequence
  Synthetic oligonucleotide
gccccacgggaggacacttagttgaagtgccagcc

SEQ ID NO: 4282 - DNA, 35 bp, Artificial Sequence
  Synthetic oligonucleotide
cacgcaaacgacctgccgctagtgattagaacaag

SEQ ID NO: 4283 - DNA, 35 bp, Artificial Sequence
  Synthetic oligonucleotide
tcacactcaggcatatctcctactgaccccgaaac

SEQ ID NO: 4284 - DNA, 35 bp, Artificial Sequence
  Synthetic oligonucleotide
actcaccggcctcccgctgtatcgtgtgaatcgcc

SEQ ID NO: 4285 - DNA, 37 bp, Artificial Sequence
  Synthetic oligonucleotide
tagcaacgctcctcactgaccccggacagttcatcga

SEQ ID NO: 4286 - DNA, 35 bp, Artificial Sequence
  Synthetic oligonucleotide
gccgcaccctagagcatcacaacgaactaattcgc

SEQ ID NO: 4287 - DNA, 36 bp, Artificial Sequence
  Synthetic oligonucleotide
gaacacgaaccagagccccacacactgaccctgcca

SEQ ID NO: 4288 - DNA, 38 bp, Artificial Sequence
  Synthetic oligonucleotide
ccgcgatggcgggcgtagggtgacggttgaaaagttga

SEQ ID NO: 4289 - DNA, 38 bp, Artificial Sequence
  Synthetic oligonucleotide
gagtcaacatagcaggcttccgcaccatctgcaaatga

SEQ ID NO: 4290 - DNA, 35 bp, Artificial Sequence
  Synthetic oligonucleotide
tacgactccgaccccgactcctatgcaccctgaac

SEQ ID NO: 4291 - DNA, 35 bp, Artificial Sequence
  Synthetic oligonucleotide
accgaccccgcacccatttatccagcatggcctgc

SEQ ID NO: 4292 - DNA, 38 bp, Artificial Sequence
  Synthetic oligonucleotide
tcagcgatgggcaggcttccgcgaaaaaatccaaatga

SEQ ID NO: 4293 - DNA, 38 bp, Artificial Sequence
  Synthetic oligonucleotide
actcgaccaccgaccccgatattccaggtaccccgtga

SEQ ID NO: 4294 - DNA, 35 bp, Artificial Sequence; identical to SEQ ID NO: 1654
  Synthetic oligonucleotide

SEQ ID NO: 4295 - DNA, 35 bp, Artificial Sequence
  Synthetic oligonucleotide
gcacccggaagacccccgacaggttcatcgctaga

SEQ ID NO: 4296 - DNA, 35 bp, Artificial Sequence
  Synthetic oligonucleotide
tgccattccggggttggggcaccatatgcgtttcg

SEQ ID NO: 4297 - DNA, 35 bp, Artificial Sequence
  Synthetic oligonucleotide
gaggatcgcaagcttgtcagacccccagacctccg

SEQ ID NO: 4298 - DNA, 38 bp, Artificial Sequence
  Synthetic oligonucleotide
aatgcggtcagtgagatagattggaacggtgcccctga

SEQ ID NO: 4299 - DNA, 35 bp, Artificial Sequence
  Synthetic oligonucleotide
tacgacacggcgtactccattcatctcggataggc

SEQ ID NO: 4300 - DNA, 35 bp, Artificial Sequence
  Synthetic oligonucleotide
aagcccaaccccgaaaagcgacaagttacccccgg

SEQ ID NO: 4301 - DNA, 37 bp, Artificial Sequence
  Synthetic oligonucleotide
ggaaccccagtgaacttgcccacaacggatgcgttga

SEQ ID NO: 4302 - DNA, 36 bp, Artificial Sequence
  Synthetic oligonucleotide
atcacaacagaggcctagaattagatgcggtaaaaa

SEQ ID NO: 4303 - DNA, 38 bp, Artificial Sequence
  Synthetic oligonucleotide
gccaacatcaccactgaccccgccgcaatgtaggctga

SEQ ID NO: 4304 - DNA, 36 bp, Artificial Sequence
  Synthetic oligonucleotide
agcgggaggagcgtggtgggaagaacacgtggggta

SEQ ID NO: 4305 - DNA, 36 bp, Artificial Sequence
  Synthetic oligonucleotide
cgggaccgactggggccgtctgatcttttcttgtga

SEQ ID NO: 4306 - DNA, 35 bp, Artificial Sequence
  Synthetic oligonucleotide
actgaccccgaacggaccccgcatatggatacact

SEQ ID NO: 4307 - DNA, 35 bp, Artificial Sequence
  Synthetic oligonucleotide
aacatagcactgaccccgcctcggcagtccccttt

SEQ ID NO: 4308 - DNA, 36 bp, Artificial Sequence
  Synthetic oligonucleotide
agcaccccaccagacggtcacaaaccccgcaattga

SEQ ID NO: 4309 - DNA, 35 bp, Artificial Sequence
  Synthetic oligonucleotide
cacgtcacaacggctattgacggactgctgttttc

SEQ ID NO: 4310 - DNA, 35 bp, Artificial Sequence
  Synthetic oligonucleotide
acaccctgaccccgtaaataacccaatcacgtgtg

SEQ ID NO: 4311 - DNA, 36 bp, Artificial Sequence
  Synthetic oligonucleotide
acacacagaccccgccctgcgtccaaatccctgcta

SEQ ID NO: 4312 - DNA, 36 bp, Artificial Sequence
  Synthetic oligonucleotide
acatgcgcccttctgacccccagacgtccaccttga

SEQ ID NO: 4313 - DNA, 38 bp, Artificial Sequence
  Synthetic oligonucleotide
tgtggcaacggcgacctgttgccaagcccggtgtctga

SEQ ID NO: 4314 - DNA, 35 bp, Artificial Sequence
  Synthetic oligonucleotide
taaccccggccatgtaatatcccactgaccccgtg

SEQ ID NO: 4315 - DNA, 35 bp, Artificial Sequence
  Synthetic oligonucleotide
tcatgcgactccggacctgaccctgccactttacc

SEQ ID NO: 4316 - DNA, 36 bp, Artificial Sequence
  Synthetic oligonucleotide
accacgaacgcatctttaaactgaccccgactccca

SEQ ID NO: 4317 - DNA, 35 bp, Artificial Sequence
  Synthetic oligonucleotide
gtgtgcctcccgtcgattgttatctccaggcgtac

SEQ ID NO: 4318 - DNA, 36 bp, Artificial Sequence
  Synthetic oligonucleotide
acaccacggcctaggaatgtaagctggcgtgcgcca

SEQ ID NO: 4319 - DNA, 36 bp, Artificial Sequence
  Synthetic oligonucleotide
atctgcacaggccgtccctattacctagccttatca

SEQ ID NO: 4320 - DNA, 37 bp, Artificial Sequence
  Synthetic oligonucleotide
cgcgtcgacgtacgagtggcatgtgtatgacgcatga

SEQ ID NO: 4321 - DNA, 38 bp, Artificial Sequence
  Synthetic oligonucleotide
tgcgctcagacccccagatagtctacggttcgcactga

SEQ ID NO: 4322 - DNA, 37 bp, Artificial Sequence
  Synthetic oligonucleotide
catgtgctgcagctccacacgagtctgagacatgaga

SEQ ID NO: 4323 - DNA, 38 bp, Artificial Sequence
  Synthetic oligonucleotide
taggaggccagttcggacccccgacatcaccccactga

SEQ ID NO: 4324 - DNA, 37 bp, Artificial Sequence
  Synthetic oligonucleotide
tcaagccccacggtacctagcgattagagcgttggga

SEQ ID NO: 4325 - DNA, 36 bp, Artificial Sequence
  Synthetic oligonucleotide
tacaccctgcccactgaccccgaccacttgttgcca

SEQ ID NO: 4326 - DNA, 36 bp, Artificial Sequence
  Synthetic oligonucleotide
gagccccgaccccgctgcttacccaaccctggaata

SEQ ID NO: 4327 - DNA, 38 bp, Artificial Sequence
  Synthetic oligonucleotide
gaattacagagacggttcccgcgaagcctaacgattga

SEQ ID NO: 4328 - DNA, 35 bp, Artificial Sequence
  Synthetic oligonucleotide
tgctaccacacagaccccgaccttatccgaatact

SEQ ID NO: 4329 - DNA, 35 bp, Artificial Sequence
  Synthetic oligonucleotide
tgcccgaccccgtcgattgtgtatgtaggttgtca

SEQ ID NO: 4330 - DNA, 36 bp, Artificial Sequence
  Synthetic oligonucleotide
tatccacagggcgaaggcaaagtgtcatgagtgtca

SEQ ID NO: 4331 - DNA, 37 bp, Artificial Sequence
  Synthetic oligonucleotide
gcacgagaggtgcggaggacccccagactgttctaga

SEQ ID NO: 4332 - DNA, 38 bp, Artificial Sequence
  Synthetic oligonucleotide
tatgccgcatgcaccgtattttcttcgcctttatctga

SEQ ID NO: 4333 - DNA, 38 bp, Artificial Sequence
  Synthetic oligonucleotide
acagcggagcgtacgtgcgctggtctgagtcctgttga

SEQ ID NO: 4334 - DNA, 36 bp, Artificial Sequence
  Synthetic oligonucleotide
tcacccagcactcactcaccaacacgaccacaccca

SEQ ID NO: 4335 - DNA, 35 bp, Artificial Sequence
  Synthetic oligonucleotide
tactgaccccgtaaaaggccaccccgagtacctgg

SEQ ID NO: 4336 - DNA, 36 bp, Artificial Sequence
  Synthetic oligonucleotide
gatgcatgccgcaggagtgtcctttctacagcatta

SEQ ID NO: 4337 - DNA, 36 bp, Artificial Sequence
  Synthetic oligonucleotide
acctgccccaacatacagaccccgttaccttattca

SEQ ID NO: 4338 - DNA, 37 bp, Artificial Sequence
  Synthetic oligonucleotide
gcgaagaacctcctacatcccaatgtggcccccagga

SEQ ID NO: 4339 - DNA, 35 bp, Artificial Sequence
  Synthetic oligonucleotide
ttcgaccccactgaccccgccgaactaatccctgg

SEQ ID NO: 4340 - DNA, 36 bp, Artificial Sequence
  Synthetic oligonucleotide
agcgagtccgtagtcccatggcaggataattaatca

SEQ ID NO: 4341 - DNA, 37 bp, Artificial Sequence
  Synthetic oligonucleotide
gatgctatgcgccctaatcccgaggccccaaccccga

SEQ ID NO: 4342 - DNA, 35 bp, Artificial Sequence
  Synthetic oligonucleotide
tgaggtgctcaactggagtatagataaccttcagc

SEQ ID NO: 4343 - DNA, 35 bp, Artificial Sequence
  Synthetic oligonucleotide
taacgcacactgaccccgcttacgagttctaacaa

SEQ ID NO: 4344 - DNA, 37 bp, Artificial Sequence
  Synthetic oligonucleotide
ttcaacaccgcgtgacttcgagatggcatgccacgga

SEQ ID NO: 4345 - DNA, 37 bp, Artificial Sequence
  Synthetic oligonucleotide
gacaatccggctggtttctctcaacgctagcgcggga

SEQ ID NO: 4346 - DNA, 38 bp, Artificial Sequence
  Synthetic oligonucleotide
gtgaccgcccgccttattacacacccattgcaccctga

SEQ ID NO: 4347 - DNA, 37 bp, Artificial Sequence
  Synthetic oligonucleotide
tacggaaggccaccccgcttaccgcctctgaccccga

SEQ ID NO: 4348 - DNA, 37 bp, Artificial Sequence
  Synthetic oligonucleotide
gtgcatgggtgccgcttggcctgggggttgggaatga

SEQ ID NO: 4349 - DNA, 35 bp, Artificial Sequence
  Synthetic oligonucleotide
ttgactgaccccgccccatcgactccatagcatcg

SEQ ID NO: 4350 - DNA, 36 bp, Artificial Sequence
  Synthetic oligonucleotide
tgagcggaggcctggcaggtatagtcgccatggcca

SEQ ID NO: 4351 - DNA, 35 bp, Artificial Sequence
  Synthetic oligonucleotide
gccggacgaggaatacggctggcacggacgaacct

SEQ ID NO: 4352 - DNA, 36 bp, Artificial Sequence
  Synthetic oligonucleotide
actgaccccgataaagtgtaccttacacgtacgata

SEQ ID NO: 4353 - DNA, 36 bp, Artificial Sequence
  Synthetic oligonucleotide
gccccccgtcgatggggaatgcagacccccacaaaa

SEQ ID NO: 4354 - DNA, 37 bp, Artificial Sequence
  Synthetic oligonucleotide
cacagcacgcgaagcaccgtccgtcgtctcgcggaga

SEQ ID NO: 4355 - DNA, 37 bp, Artificial Sequence
  Synthetic oligonucleotide
actgaccccgaaccacatcgatgcagtccacgtgaga

SEQ ID NO: 4356 - DNA, 35 bp, Artificial Sequence
  Synthetic oligonucleotide
gcacatccacgcagtccacccgaccttctaaccgc

SEQ ID NO: 4357 - DNA, 36 bp, Artificial Sequence
  Synthetic oligonucleotide
tactgaccccggctcttatttggaccccgttattta

SEQ ID NO: 4358 - DNA, 35 bp, Artificial Sequence
  Synthetic oligonucleotide
aacgcagtccccagacaacgttccttaaggcgcac

SEQ ID NO: 4359 - DNA, 36 bp, Artificial Sequence
  Synthetic oligonucleotide
atctccccagagatccagcactgccgtgtcccaaca

SEQ ID NO: 4360 - DNA, 36 bp, Artificial Sequence
  Synthetic oligonucleotide
aactgccgcgcctaacaccgaccccgtatctcataa

SEQ ID NO: 4361 - DNA, 35 bp, Artificial Sequence
  Synthetic oligonucleotide
tgtagcgcaagacccccagacagtccacgcggaaa

SEQ ID NO: 4362 - DNA, 36 bp, Artificial Sequence
  Synthetic oligonucleotide
ccgggaggacgccgtgtgtagtttggactaattgga

SEQ ID NO: 4363 - DNA, 36 bp, Artificial Sequence
  Synthetic oligonucleotide
gacggagggcgtggacgaatgggagcacatgtgtaa

SEQ ID NO: 4364 - DNA, 38 bp, Artificial Sequence
  Synthetic oligonucleotide
agcacgcgcaggaccccggatgtgcctgcaacccctga

SEQ ID NO: 4365 - DNA, 35 bp, Artificial Sequence
  Synthetic oligonucleotide
acaccgaccccgttccttacgtcaggcctcccctc

SEQ ID NO: 4366 - DNA, 35 bp, Artificial Sequence
  Synthetic oligonucleotide
gcgccacacactgaccccgttaagccacaatccta

SEQ ID NO: 4367 - DNA, 36 bp, Artificial Sequence
  Synthetic oligonucleotide
ccagtggggagtgcaaagacgtgaaggtggagttaa

SEQ ID NO: 4368 - DNA, 37 bp, Artificial Sequence
  Synthetic oligonucleotide
tcacgcccagaaacccccacgcgacaagacgtctaga

SEQ ID NO: 4369 - DNA, 35 bp, Artificial Sequence
  Synthetic oligonucleotide
atgcgccccagatctctctggataagctctattcg

SEQ ID NO: 4370 - DNA, 36 bp, Artificial Sequence
  Synthetic oligonucleotide
cgcatcgcggcgtacgagcgttttcgcaacattcga

SEQ ID NO: 4371 - DNA, 35 bp, Artificial Sequence
  Synthetic oligonucleotide
gcctgctcatcactaccccgcatgcccaaccccgc

SEQ ID NO: 4372 - DNA, 35 bp, Artificial Sequence
  Synthetic oligonucleotide
acacccccacacttcgaatctaacctacgtgagcg

SEQ ID NO: 4373 - DNA, 35 bp, Artificial Sequence
  Synthetic oligonucleotide
acaccacgcaagcctatgtcttccaagtcaggaaa

SEQ ID NO: 4374 - DNA, 38 bp, Artificial Sequence
  Synthetic oligonucleotide
gacgaggacaggagtgtggctaaggagacggtagatga

SEQ ID NO: 4375 - DNA, 36 bp, Artificial Sequence
  Synthetic oligonucleotide
agcccggacgtgtattcagtaagagcacgtggggta

SEQ ID NO: 4376 - DNA, 37 bp, Artificial Sequence
  Synthetic oligonucleotide
gcactgaccccgcatagacatctccgaactcggccga

SEQ ID NO: 4377 - DNA, 38 bp, Artificial Sequence
  Synthetic oligonucleotide
tccaggggggtcaccacttggtattgaaacattactga

SEQ ID NO: 4378 - DNA, 36 bp, Artificial Sequence
  Synthetic oligonucleotide
gtggcctacccgtcgattttgttaaggtaatgttga

SEQ ID NO: 4379 - DNA, 34 bp, Artificial Sequence
  Synthetic oligonucleotide
ggtgagcaagtagcgcatggccggtttcgattgc

SEQ ID NO: 4380 - DNA, 36 bp, Artificial Sequence
  Synthetic oligonucleotide
gtgcaacacgggatgcagttgggacgtcacgctcga

SEQ ID NO: 4381 - DNA, 36 bp, Artificial Sequence
  Synthetic oligonucleotide
acactgcaggtaatatgcgcgcacaccacccatcca

SEQ ID NO: 4382 - DNA, 35 bp, Artificial Sequence
  Synthetic oligonucleotide
gcatgcacagtaaataagcgtgtagcagtgcctca

SEQ ID NO: 4383 - DNA, 37 bp, Artificial Sequence
  Synthetic oligonucleotide
tcaaccccgctaattaccacatcactacggaccccga

SEQ ID NO: 4384 - DNA, 37 bp, Artificial Sequence
  Synthetic oligonucleotide
gagcagagcgaacgtacaggtattgggcgtcatggga

SEQ ID NO: 4385 - DNA, 37 bp, Artificial Sequence
  Synthetic oligonucleotide
gctgacctcagcacgaagtaacgtagagaggtatcga

SEQ ID NO: 4386 - DNA, 37 bp, Artificial Sequence
  Synthetic oligonucleotide
ccggcatagacaggatctggttgtttcgtgtagccga

SEQ ID NO: 4387 - DNA, 36 bp, Artificial Sequence
  Synthetic oligonucleotide
aagccccctcccatgcacgcatcacactgaccccga

SEQ ID NO: 4388 - DNA, 36 bp, Artificial Sequence
  Synthetic oligonucleotide
gcctgccctagttagacccccgactgttctctcaca

SEQ ID NO: 4389 - DNA, 38 bp, Artificial Sequence
  Synthetic oligonucleotide
ggtcagccagccagacccccagacgttcatctatgtga

SEQ ID NO: 4390 - DNA, 37 bp, Artificial Sequence
  Synthetic oligonucleotide
tgtgcggtagcgcaacgtaatcaatgtcaatcttcga

SEQ ID NO: 4391 - DNA, 38 bp, Artificial Sequence
  Synthetic oligonucleotide
actggggacggactgcagaccagtgattatggaaatga

SEQ ID NO: 4392 - DNA, 35 bp, Artificial Sequence
  Synthetic oligonucleotide
gcgaagcacaagtgttgaaaggttagtcctggttc

SEQ ID NO: 4393 - DNA, 36 bp, Artificial Sequence
  Synthetic oligonucleotide
gcctgggggtgtccgttcgttttgggaaaccattga

SEQ ID NO: 4394 - DNA, 37 bp, Artificial Sequence
  Synthetic oligonucleotide
gacccatccgcccccgttctgacaccagcaccttaga

SEQ ID NO: 4395 - DNA, 36 bp, Artificial Sequence
  Synthetic oligonucleotide
gcatagccaggccacgttctgatcctacagtcccaa

SEQ ID NO: 4396 - DNA, 36 bp, Artificial Sequence
  Synthetic oligonucleotide
gacgtacagatcctcgcctccttaccctgaccccga

SEQ ID NO: 4397 - DNA, 35 bp, Artificial Sequence
  Synthetic oligonucleotide
aaagccacacgaccagaccccgttttactaccccg

SEQ ID NO: 4398 - DNA, 37 bp, Artificial Sequence
  Synthetic oligonucleotide
tccctgacctgaccccgaaaatttagtctttctaaga

SEQ ID NO: 4399 - DNA, 38 bp, Artificial Sequence
  Synthetic oligonucleotide
tgacacccgacgaatgagtcgaggactttccggagtga

SEQ ID NO: 4400 - DNA, 36 bp, Artificial Sequence
  Synthetic oligonucleotide
tccgtcccaacggaccatcgcaattccttaacgtaa

SEQ ID NO: 4401 - DNA, 35 bp, Artificial Sequence
  Synthetic oligonucleotide
ttgctgccagacccccagacatacactgtcctcta

SEQ ID NO: 4402 - DNA, 37 bp, Artificial Sequence
  Synthetic oligonucleotide
gcacgaaccacaactactgaccccgcctcgaaccgga

SEQ ID NO: 4403 - DNA, 36 bp, Artificial Sequence
  Synthetic oligonucleotide
gacacgtgcaggtgggaacgacgtatgctcatgcaa

SEQ ID NO: 4404 - DNA, 36 bp, Artificial Sequence
  Synthetic oligonucleotide
ttcgcttccgttcacctaaacaaatgcgaaggcgca

SEQ ID NO: 4405 - DNA, 38 bp, Artificial Sequence
  Synthetic oligonucleotide
agcccacactgttaagatcactggaacggtgcccctga

SEQ ID NO: 4406 - DNA, 38 bp, Artificial Sequence
  Synthetic oligonucleotide
gacaacccggtacacgtctagctgcacccatcgcatga

SEQ ID NO: 4407 - DNA, 36 bp, Artificial Sequence
  Synthetic oligonucleotide
tgtgaaccacacactactcaaaacagacatggaaca

SEQ ID NO: 4408 - DNA, 38 bp, Artificial Sequence
  Synthetic oligonucleotide
gatcaaagcggcgagggacgttaagtttgtagcagtga

SEQ ID NO: 4409 - DNA, 34 bp, Artificial Sequence
  Synthetic oligonucleotide
gcggaagcacgtttagtgtagtgccagaccgcga

SEQ ID NO: 4410 - DNA, 36 bp, Artificial Sequence
  Synthetic oligonucleotide
tacgacaatacgcggagttgcgtataactgcaggtt

SEQ ID NO: 4411 - DNA, 37 bp, Artificial Sequence
  Synthetic oligonucleotide
gacgccacaactagacggttcagtcaagcgtagagga

SEQ ID NO: 4412 - DNA, 37 bp, Artificial Sequence
  Synthetic oligonucleotide
gaccgaccccgacgccactatttactaaccccgtaga

SEQ ID NO: 4413 - DNA, 38 bp, Artificial Sequence
  Synthetic oligonucleotide
gccgagcacagatgtgggagggactaacggtgccctga

SEQ ID NO: 4414 - DNA, 35 bp, Artificial Sequence
  Synthetic oligonucleotide
tgcgacgctgcatcgttatcactgaccccgtcgac

SEQ ID NO: 4415 - DNA, 36 bp, Artificial Sequence
  Synthetic oligonucleotide
gcagggaagacccccgacagcaatactctgccctaa

SEQ ID NO: 4416 - DNA, 36 bp, Artificial Sequence
  Synthetic oligonucleotide
atgctgcctgacataaggttctgtacggtgaatgca

SEQ ID NO: 4417 - DNA, 36 bp, Artificial Sequence
  Synthetic oligonucleotide
tatccagcaacagtagtcatggcagttccgcacaca

SEQ ID NO: 4418 - DNA, 37 bp, Artificial Sequence
  Synthetic oligonucleotide
gcatcctccagataatcactgaccccgcttcatctga

SEQ ID NO: 4419 - DNA, 35 bp, Artificial Sequence
  Synthetic oligonucleotide
ccagcccgatggatcgccctgtaattgttcccctt

SEQ ID NO: 4420 - DNA, 35 bp, Artificial Sequence
  Synthetic oligonucleotide
ggacaacgtgggcgttggtcaaaatgtgatcagtc

SEQ ID NO: 4421 - DNA, 35 bp, Artificial Sequence
  Synthetic oligonucleotide
accacgaccgcaagtaccctactgagacatgtgcc

SEQ ID NO: 4422 - DNA, 36 bp, Artificial Sequence
  Synthetic oligonucleotide
ttgaccccgcaagtctatacccaaccctgtaaacaa

SEQ ID NO: 4423 - DNA, 38 bp, Artificial Sequence
  Synthetic oligonucleotide
ggtcagacccccagacggcgttgactaggaatcaatga

SEQ ID NO: 4424 - DNA, 36 bp, Artificial Sequence
  Synthetic oligonucleotide
acctgaccctgacgaactgcaacataccccgacgta

SEQ ID NO: 4425 - DNA, 35 bp, Artificial Sequence
  Synthetic oligonucleotide
tgaccacagcccctcgactatccgtaacagtacat

SEQ ID NO: 4426 - DNA, 38 bp, Artificial Sequence
  Synthetic oligonucleotide
gcacggtgatgtccatggagatctgtggggaagaatga

SEQ ID NO: 4427 - DNA, 35 bp, Artificial Sequence
  Synthetic oligonucleotide
tcaccccgcaaccggtagaagggagaccacgcagt

SEQ ID NO: 4428 - DNA, 36 bp, Artificial Sequence
  Synthetic oligonucleotide
ggagcccagtgctctgaccccgctactttttcctga

SEQ ID NO: 4429 - DNA, 36 bp, Artificial Sequence
  Synthetic oligonucleotide
aacctgaccccgcttgtgaccccgatcggagactca

SEQ ID NO: 4430 - DNA, 36 bp, Artificial Sequence
  Synthetic oligonucleotide
accaccaccccgtagccctaccaccccgtccgcaaa

SEQ ID NO: 4431 - DNA, 35 bp, Artificial Sequence
  Synthetic oligonucleotide
accgctcgaacctgatctacactgaccccgaaaac

SEQ ID NO: 4432 - DNA, 35 bp, Artificial Sequence
  Synthetic oligonucleotide
tgtgccgccaccatttaaaccttgccacacgcact

SEQ ID NO: 4433 - DNA, 37 bp, Artificial Sequence
  Synthetic oligonucleotide
tcccacacagctgatctctcacggttccacaccccga

SEQ ID NO: 4434 - DNA, 35 bp, Artificial Sequence
  Synthetic oligonucleotide
aaccccgcccgtgaccccgctacaacgctcttcga

SEQ ID NO: 4435 - DNA, 37 bp, Artificial Sequence
  Synthetic oligonucleotide
gtcacggtagcacagacccccagccgtcatacctgga

SEQ ID NO: 4436 - DNA, 35 bp, Artificial Sequence
  Synthetic oligonucleotide
cgatagcgggtggggtcgactagtgcttggggtct

SEQ ID NO: 4437 - DNA, 35 bp, Artificial Sequence
  Synthetic oligonucleotide
tctgaccccgtacttatttttccagcctgctaacc

SEQ ID NO: 4438 - DNA, 38 bp, Artificial Sequence
  Synthetic oligonucleotide
gcaacatgcacagactcctgcaataaagtcagtgttga

SEQ ID NO: 4439 - DNA, 36 bp, Artificial Sequence
  Synthetic oligonucleotide
tatgcagaggccgagctttcactgaccccgctacca

SEQ ID NO: 4440 - DNA, 36 bp, Artificial Sequence
  Synthetic oligonucleotide
gcaacacgcacggacgagaatgcctcatttatatca

SEQ ID NO: 4441 - DNA, 35 bp, Artificial Sequence
  Synthetic oligonucleotide
ttgaagccgtagtcagacccccagcgagtgcctaa

SEQ ID NO: 4442 - DNA, 35 bp, Artificial Sequence
  Synthetic oligonucleotide
gccacgacttgccgcgcgtactcagcttctcttac

SEQ ID NO: 4443 - DNA, 38 bp, Artificial Sequence
  Synthetic oligonucleotide
actgaccccgcattcagcgcgcaggatctaccccgtga

SEQ ID NO: 4444 - DNA, 36 bp, Artificial Sequence
  Synthetic oligonucleotide
acgctcccggtgtcaggtgaatgagtctctcacgta

SEQ ID NO: 4445 - DNA, 37 bp, Artificial Sequence
  Synthetic oligonucleotide
ccatcacgagcccctcccgcagtcgaaccgtccagga

SEQ ID NO: 4446 - DNA, 36 bp, Artificial Sequence
  Synthetic oligonucleotide
ggaccggacggacccccggacagtgatcgtcctaca

SEQ ID NO: 4447 - DNA, 35 bp, Artificial Sequence
  Synthetic oligonucleotide
aagccgcgcagacccccagacgcttgtccccgcat

SEQ ID NO: 4448 - DNA, 37 bp, Artificial Sequence
  Synthetic oligonucleotide
tcaaccccgaaacagaccccgtgctgatgtgtcccta

SEQ ID NO: 4449 - DNA, 37 bp, Artificial Sequence
  Synthetic oligonucleotide
tcaccgaccgcagacacaaccagctagactaacccga

SEQ ID NO: 4450 - DNA, 36 bp, Artificial Sequence
  Synthetic oligonucleotide
ttcgcacgatcatctcatccgtggctcctggtgtca

SEQ ID NO: 4451 - DNA, 35 bp, Artificial Sequence
  Synthetic oligonucleotide
aacccaaccccgactccttcgaccccgtccagtcc

SEQ ID NO: 4452 - DNA, 36 bp, Artificial Sequence
  Synthetic oligonucleotide
tgcaatggacgaataccccggtgtcttatgggtata

SEQ ID NO: 4453 - DNA, 36 bp, Artificial Sequence
  Synthetic oligonucleotide
cggctctgtcgcaggacagaagtcgaattgccacca

SEQ ID NO: 4454 - DNA, 38 bp, Artificial Sequence
  Synthetic oligonucleotide
gacgcggtggaacgtcacgcggcagttatttaccttga

SEQ ID NO: 4455 - DNA, 36 bp, Artificial Sequence
  Synthetic oligonucleotide
tagcacgcagacgtatcgaatcctctaccctgtgaa

SEQ ID NO: 4456 - DNA, 38 bp, Artificial Sequence
  Synthetic oligonucleotide
gacacgcaaggccctaccacctcatcctagaatgctga

SEQ ID NO: 4457 - DNA, 36 bp, Artificial Sequence
  Synthetic oligonucleotide
gcgaagagcacggacgcattctgcatcatcatataa

SEQ ID NO: 4458 - DNA, 38 bp, Artificial Sequence
  Synthetic oligonucleotide
tgaccagtcagggcaacgtacaagccctgtgcctatga

SEQ ID NO: 4459 - DNA, 38 bp, Artificial Sequence
  Synthetic oligonucleotide
ttggtacccaccgtccgtcacgtctgtgcaagagttga

SEQ ID NO: 4460 - DNA, 36 bp, Artificial Sequence
  Synthetic oligonucleotide
accaacaccggccaacagaggttcgacgccactata

SEQ ID NO: 4461 - DNA, 36 bp, Artificial Sequence
  Synthetic oligonucleotide
ttgcacgcacagatagtcttcgctatactgttgcga

SEQ ID NO: 4462 - DNA, 35 bp, Artificial Sequence
  Synthetic oligonucleotide
aacaccatccgcgaacctcgccccaacaccaccgg

SEQ ID NO: 4463 - DNA, 37 bp, Artificial Sequence
  Synthetic oligonucleotide
gactagaccgaccctgatgacctactgaccccgtgga

SEQ ID NO: 4464 - DNA, 37 bp, Artificial Sequence
  Synthetic oligonucleotide
ttcacaccgcagctcagacccccagacattctgtcaa

SEQ ID NO: 4465 - DNA, 38 bp, Artificial Sequence
  Synthetic oligonucleotide
tccagaccccgccaattgagtaccccgtgtcatactga

SEQ ID NO: 4466 - DNA, 38 bp, Artificial Sequence
  Synthetic oligonucleotide
gaacaccggccggtgtgagcgtacgtagaacctcttga

SEQ ID NO: 4467 - DNA, 35 bp, Artificial Sequence
  Synthetic oligonucleotide
accaccatcgcattagtcccttgacccaacctgtc

SEQ ID NO: 4468 - DNA, 36 bp, Artificial Sequence
  Synthetic oligonucleotide
acgctcaggaggtacaatgactgtggataagatgta

SEQ ID NO: 4469 - DNA, 35 bp, Artificial Sequence
  Synthetic oligonucleotide
gccgcccagcaacacatccaccttgaaacgctcca

SEQ ID NO: 4470 - DNA, 35 bp, Artificial Sequence
  Synthetic oligonucleotide
cgcggaacagccgtgcgtgtgcaaccagcttgtac

SEQ ID NO: 4471 - DNA, 35 bp, Artificial Sequence
  Synthetic oligonucleotide
gacaaccacgccaatggtgtacaactgcgatctgc

SEQ ID NO: 4472 - DNA, 37 bp, Artificial Sequence
  Synthetic oligonucleotide
gtcacaccgcagctcagacccccagacattctgtcga

SEQ ID NO: 4473 - DNA, 36 bp, Artificial Sequence
  Synthetic oligonucleotide
atacgcgtcggacccccagacagccctcgggctcaa

SEQ ID NO: 4474 - DNA, 38 bp, Artificial Sequence
  Synthetic oligonucleotide
gacgcagagccgcacgggattggatgacgcctgtttga

SEQ ID NO: 4475 - DNA, 36 bp, Artificial Sequence
  Synthetic oligonucleotide
tggacgtgcctagataacccaagtgtaaagcagtat

SEQ ID NO: 4476 - DNA, 38 bp, Artificial Sequence
  Synthetic oligonucleotide
actgaccccgctatcagactcctctctacgccgattga

SEQ ID NO: 4477 - DNA, 36 bp, Artificial Sequence
  Synthetic oligonucleotide
gcccaggccagaaagacccccagaccgtaaccctaa

SEQ ID NO: 4478 - DNA, 38 bp, Artificial Sequence
  Synthetic oligonucleotide
tgtacgcacatgggtaacctgacaagtttcgggagtga

SEQ ID NO: 4479 - DNA, 37 bp, Artificial Sequence
  Synthetic oligonucleotide
atcgacgcacacaaggtaacggatcgtgttcggagga

SEQ ID NO: 4480 - DNA, 35 bp, Artificial Sequence
  Synthetic oligonucleotide
tcctgaccccgcttacatgacacaatcgctccgtt

SEQ ID NO: 4481 - DNA, 35 bp, Artificial Sequence
  Synthetic oligonucleotide
ttcaacccaccctgaccccgctttacccacgctag

SEQ ID NO: 4482 - DNA, 37 bp, Artificial Sequence
  Synthetic oligonucleotide
gccaaccctccagtgcttgattcacactcattcgcga

SEQ ID NO: 4483 - DNA, 35 bp, Artificial Sequence
  Synthetic oligonucleotide
gacacaaactccactatttccgaccccgccgcatg

SEQ ID NO: 4484 - DNA, 36 bp, Artificial Sequence
  Synthetic oligonucleotide
acgtccctaccggcaacatgccaactgaccccgaaa

SEQ ID NO: 4485 - DNA, 37 bp, Artificial Sequence
  Synthetic oligonucleotide
acacacgttctcagcgttgaatgcgtgtttctaccga

SEQ ID NO: 4486 - DNA, 37 bp, Artificial Sequence
  Synthetic oligonucleotide
gcacgaaccccaactactgaccccgcctcgaaccgca

SEQ ID NO: 4487 - DNA, 35 bp, Artificial Sequence
  Synthetic oligonucleotide
gacaatcctgggaactaactaggcacgggtctctc

SEQ ID NO: 4488 - DNA, 35 bp, Artificial Sequence
  Synthetic oligonucleotide
aacaccgcacatgagtcggaggacaaatctgggag

SEQ ID NO: 4489 - DNA, 35 bp, Artificial Sequence
  Synthetic oligonucleotide
ttcagcccacaccgaccccgtgcccagtctcgttc

SEQ ID NO: 4490 - DNA, 35 bp, Artificial Sequence
  Synthetic oligonucleotide
tgcgcccggatgccccccactgaccccgaatgcga

SEQ ID NO: 4491 - DNA, 37 bp, Artificial Sequence
  Synthetic oligonucleotide
tgccccaatacgtgcgttccactgaccccgaagaaga

SEQ ID NO: 4492 - DNA, 35 bp, Artificial Sequence
  Synthetic oligonucleotide
taccgaacacgcttcacctgaccccgtctctgaac

SEQ ID NO: 4493 - DNA, 36 bp, Artificial Sequence
  Synthetic oligonucleotide
gccgaggcatggccgagggtactggggaacgcggca

SEQ ID NO: 4494 - DNA, 37 bp, Artificial Sequence
  Synthetic oligonucleotide
gacaaccgtcgcaaaggcatgcagagaactagcagga

SEQ ID NO: 4495 - DNA, 35 bp, Artificial Sequence
  Synthetic oligonucleotide
gccatgcgtaactgcaaccgtctaacactaggaag

SEQ ID NO: 4496 - DNA, 38 bp, Artificial Sequence
  Synthetic oligonucleotide
gacaaccatatgatccccacccactgaccccgacctga

SEQ ID NO: 4497 - DNA, 35 bp, Artificial Sequence
  Synthetic oligonucleotide
gacacagcagtcgaagcgtatctcgaatcgttatc

SEQ ID NO: 4498 - DNA, 38 bp, Artificial Sequence
  Synthetic oligonucleotide
tcaaccgcaacggtctatattgacattcggacgaatga

SEQ ID NO: 4499 - DNA, 35 bp, Artificial Sequence
  Synthetic oligonucleotide
tccgccgtcactgacccatctgaccccgcaaaact

SEQ ID NO: 4500 - DNA, 37 bp, Artificial Sequence
  Synthetic oligonucleotide
cgccagagcaggactgagtggtactttgttcatggta

SEQ ID NO: 4501 - DNA, 36 bp, Artificial Sequence
  Synthetic oligonucleotide
tcgccaccccgcaatttgaccccgaacacacagaca

SEQ ID NO: 4502 - DNA, 36 bp, Artificial Sequence
  Synthetic oligonucleotide
gatacgctccactgaccccgcctcgtactacgccaa

SEQ ID NO: 4503 - DNA, 35 bp, Artificial Sequence
  Synthetic oligonucleotide
acactgaccccgagaccgtattacccagctgttgc

SEQ ID NO: 4504 - DNA, 37 bp, Artificial Sequence
  Synthetic oligonucleotide
gacgcgaaggcgatcgtggaggaatgagactaatcga

SEQ ID NO: 4505 - DNA, 38 bp, Artificial Sequence
  Synthetic oligonucleotide
gccagtggccggtaataaggcacgtctaaaagtcatga

SEQ ID NO: 4506 - DNA, 38 bp, Artificial Sequence
  Synthetic oligonucleotide
gcagaggacaatttaacgctatgtgtaaagatacgtga

SEQ ID NO: 4507 - DNA, 37 bp, Artificial Sequence
  Synthetic oligonucleotide
tgaaccataccccgttgaggtacaccactgaccccga

SEQ ID NO: 4508 - DNA, 35 bp, Artificial Sequence
  Synthetic oligonucleotide
aatgcccgaggctgcgatccatgagaccaccacca

SEQ ID NO: 4509 - DNA, 34 bp, Artificial Sequence
  Synthetic oligonucleotide
gacactcgcccacgagtcaatcgtctgcggagag

SEQ ID NO: 4510 - DNA, 38 bp, Artificial Sequence
  Synthetic oligonucleotide
cgcattgacgtcgcatctaggtgtcttgcgttaagtga

SEQ ID NO: 4511 - DNA, 36 bp, Artificial Sequence
  Synthetic oligonucleotide
gctacattcaacaaaacactgaccccgtgagattaa

SEQ ID NO: 4512 - DNA, 38 bp, Artificial Sequence
  Synthetic oligonucleotide
tccgcacgcataattcgggtgtccaattatgtgagtga

SEQ ID NO: 4513 - DNA, 36 bp, Artificial Sequence
  Synthetic oligonucleotide
tcaacaagccacattgcgtccctgccatcacctcca

SEQ ID NO: 4514 - DNA, 36 bp, Artificial Sequence
  Synthetic oligonucleotide
catgagcgcgtcggaaccccagacctcagtgcatca

SEQ ID NO: 4515 - DNA, 35 bp, Artificial Sequence
  Synthetic oligonucleotide
gcgtaagccccctgaccctgtacacaattcacacc

SEQ ID NO: 4516 - DNA, 38 bp, Artificial Sequence
  Synthetic oligonucleotide
gccgaactccaaacctgaccccgaagacagggatatga

SEQ ID NO: 4517 - DNA, 38 bp, Artificial Sequence
  Synthetic oligonucleotide
acacgcgtgcatagtgccattcgtgaagtccggggtga

SEQ ID NO: 4518 - DNA, 37 bp, Artificial Sequence
  Synthetic oligonucleotide
gccacatcgccgtgtaagtagcccagccacctgatga

SEQ ID NO: 4519 - DNA, 36 bp, Artificial Sequence
  Synthetic oligonucleotide
atgcccaggtcgcgttatcaaggaggtcaggctcaa

SEQ ID NO: 4520 - DNA, 36 bp, Artificial Sequence
  Synthetic oligonucleotide
gctgaaccgccgttagttatttagacgcaaggggaa

SEQ ID NO: 4521 - DNA, 35 bp, Artificial Sequence
  Synthetic oligonucleotide
ggatcaccgcctaagtacactgaccccgacaacaa

SEQ ID NO: 4522 - DNA, 37 bp, Artificial Sequence
  Synthetic oligonucleotide
acgcaccacagcataacagacgtcacttgctaaagga

SEQ ID NO: 4523 - DNA, 36 bp, Artificial Sequence
  Synthetic oligonucleotide
tgacttcaacgtagactgaccccgtagactgcctga

SEQ ID NO: 4524 - DNA, 37 bp, Artificial Sequence
  Synthetic oligonucleotide
gccgactgaccccgatagtgaaaatgtgaaaccccga

SEQ ID NO: 4525 - DNA, 35 bp, Artificial Sequence
  Synthetic oligonucleotide
acaccacgccccgtcgaattactgactgatctcgc

SEQ ID NO: 4526 - DNA, 35 bp, Artificial Sequence
  Synthetic oligonucleotide
atgcaacaccgcaatcgagaagacgcgtcccaacg

SEQ ID NO: 4527 - DNA, 38 bp, Artificial Sequence
  Synthetic oligonucleotide
tgaatccccaggtacagggtcgcccgtcatcccaatga

SEQ ID NO: 4528 - DNA, 35 bp, Artificial Sequence
  Synthetic oligonucleotide
atgccccagcatcgtcgtcgagccgctacgagtgc

SEQ ID NO: 4529 - DNA, 36 bp, Artificial Sequence
  Synthetic oligonucleotide
gagccggacagggcccacacttagtccccctatcta

SEQ ID NO: 4530 - DNA, 36 bp, Artificial Sequence
  Synthetic oligonucleotide
tcaccccgatggcaactttccaccgaccccgacata

SEQ ID NO: 4531 - DNA, 34 bp, Artificial Sequence
  Synthetic oligonucleotide
gatgcacgccgctatctctttttttcaccttaca

SEQ ID NO: 4532 - DNA, 36 bp, Artificial Sequence
  Synthetic oligonucleotide
gcaccgcaaaccgtaaagctaccaagagtgaagata

SEQ ID NO: 4533 - DNA, 36 bp, Artificial Sequence
  Synthetic oligonucleotide
ttccagactccgaccactgaccccgaaccgaccgta

SEQ ID NO: 4534 - DNA, 38 bp, Artificial Sequence
  Synthetic oligonucleotide
atgtgccccagcacaccgttgtgatagttcgcccatga

SEQ ID NO: 4535 - DNA, 37 bp, Artificial Sequence
  Synthetic oligonucleotide
accccgaccgtatcatgaccccgaaactgctagtaga

SEQ ID NO: 4536 - DNA, 35 bp, Artificial Sequence
  Synthetic oligonucleotide
atcgacaacagaccaagaagaagtgctgttgacga

SEQ ID NO: 4537 - DNA, 36 bp, Artificial Sequence
  Synthetic oligonucleotide
gagtgctgcagccagtgggttcacaaaatgcatcga

SEQ ID NO: 4538 - DNA, 35 bp, Artificial Sequence
  Synthetic oligonucleotide
gcgagagccgatcgttaccgtcgaattgcatcttc

SEQ ID NO: 4539 - DNA, 37 bp, Artificial Sequence
  Synthetic oligonucleotide
acaccccacgccattttgtatgagactactcgtggca

SEQ ID NO: 4540 - DNA, 37 bp, Artificial Sequence
  Synthetic oligonucleotide
aacgcagccccagcgcgccactgcctcagtccccaga

SEQ ID NO: 4541 - DNA, 38 bp, Artificial Sequence
  Synthetic oligonucleotide
acatgcccagcaatcgaatttgcaaggtcgacaggtga

SEQ ID NO: 4542 - DNA, 35 bp, Artificial Sequence
  Synthetic oligonucleotide
tcaacgcaccacataccgaccccgatacattcaac

SEQ ID NO: 4543 - DNA, 35 bp, Artificial Sequence
  Synthetic oligonucleotide
tactgaccccgaaacctgccggaccccgtccaccg

SEQ ID NO: 4544 - DNA, 35 bp, Artificial Sequence
  Synthetic oligonucleotide
ttaccccgctctgaccccgctaaagtataagcttg

SEQ ID NO: 4545 - DNA, 35 bp, Artificial Sequence
  Synthetic oligonucleotide
cgcgcccactccccgcacagaacaaggacccgctt

SEQ ID NO: 4546 - DNA, 35 bp, Artificial Sequence
  Synthetic oligonucleotide
actgaccccgcccatgtttgtccttattgacctct

SEQ ID NO: 4547 - DNA, 36 bp, Artificial Sequence
  Synthetic oligonucleotide
gcataagaggccaactgaccccgatagacagccgca

SEQ ID NO: 4548 - DNA, 38 bp, Artificial Sequence
  Synthetic oligonucleotide
gcctgtgcggcaaaccgtccaacactgaccccgattga

SEQ ID NO: 4549 - DNA, 38 bp, Artificial Sequence
  Synthetic oligonucleotide
accaacgcaacagggggtatttatcgtactgtctgtga

SEQ ID NO: 4550 - DNA, 36 bp, Artificial Sequence
  Synthetic oligonucleotide
gacatgacactgcaactagaaagagaacattcggta

SEQ ID NO: 4551 - DNA, 35 bp, Artificial Sequence
  Synthetic oligonucleotide
gacgagagcagtgcagatctagacacagccgttgt

SEQ ID NO: 4552 - DNA, 36 bp, Artificial Sequence
  Synthetic oligonucleotide
gacacacgcaggtttagtccgcttacatatccatca

SEQ ID NO: 4553 - DNA, 35 bp, Artificial Sequence
  Synthetic oligonucleotide
gatcaaccccgcaatttagataacagcgagctggc

SEQ ID NO: 4554 - DNA, 36 bp, Artificial Sequence
  Synthetic oligonucleotide
gacgcacaccgaacgttgagacgactctgcgcaata

SEQ ID NO: 4555 - DNA, 36 bp, Artificial Sequence
  Synthetic oligonucleotide
tcagccacacccagagtaatgagactaaaacgcgaa

SEQ ID NO: 4556 - DNA, 36 bp, Artificial Sequence
  Synthetic oligonucleotide
aacacccccaagtcggcggacagtatccacagcgaa

SEQ ID NO: 4557 - DNA, 36 bp, Artificial Sequence
  Synthetic oligonucleotide
atgtacccactgaccccgttctctcgacagtttgta

SEQ ID NO: 4558 - DNA, 36 bp, Artificial Sequence
  Synthetic oligonucleotide
gacgaccccggcacagtggtaagactttaatcgcaa

SEQ ID NO: 4559 - DNA, 36 bp, Artificial Sequence
  Synthetic oligonucleotide
gccgaaggcgcgaggtggtacgattgaggtgcggaa

SEQ ID NO: 4560 - DNA, 35 bp, Artificial Sequence
  Synthetic oligonucleotide
gaccgcaaggtcacgatatgagtaaccgtgcgatt

SEQ ID NO: 4561 - DNA, 35 bp, Artificial Sequence
  Synthetic oligonucleotide
gtgacacagctgcagagtcttggccattgatctgg

SEQ ID NO: 4562 - DNA, 36 bp, Artificial Sequence
  Synthetic oligonucleotide
tacgccccccgtcgatttgggatgagctgcaattaa

SEQ ID NO: 4563 - DNA, 36 bp, Artificial Sequence
  Synthetic oligonucleotide
gcacgaacgaacctcccgataagagtcgctgatcga

SEQ ID NO: 4564 - DNA, 37 bp, Artificial Sequence
  Synthetic oligonucleotide
ggacgccccaacggcactaatgactcaagtatgcaga

SEQ ID NO: 4565 - DNA, 38 bp, Artificial Sequence
  Synthetic oligonucleotide
accaacgccccacccacagtccacagtgcacgacctga

SEQ ID NO: 4566 - DNA, 38 bp, Artificial Sequence
  Synthetic oligonucleotide
aacaccgcctcagacagagcaaaatacggcctttgtga

SEQ ID NO: 4567 - DNA, 38 bp, Artificial Sequence
  Synthetic oligonucleotide
tactgaccccggtacaccctgattgatcctgaccctga

SEQ ID NO: 4568 - DNA, 36 bp, Artificial Sequence
  Synthetic oligonucleotide
tcagccgtagtcgtcaccacttggaattttggagca

SEQ ID NO: 4569 - DNA, 37 bp, Artificial Sequence
  Synthetic oligonucleotide
gcacgttctgatttgtacgttctaaacgcttgctgga

SEQ ID NO: 4570 - DNA, 35 bp, Artificial Sequence
  Synthetic oligonucleotide
taccgggagcaggtatagtcgttctccggttcggt

SEQ ID NO: 4571 - DNA, 38 bp, Artificial Sequence
  Synthetic oligonucleotide
ggtgcccccgaagtcgcgatactgaccccgcaaactga

SEQ ID NO: 4572 - DNA, 35 bp, Artificial Sequence
  Synthetic oligonucleotide
cgtgccagtcgtcgtgctgtccctccatgcgccac

SEQ ID NO: 4573 - DNA, 36 bp, Artificial Sequence
  Synthetic oligonucleotide
gattccgccctgccactgaccccgattcgcgcgcta

SEQ ID NO: 4574 - DNA, 35 bp, Artificial Sequence
  Synthetic oligonucleotide
gccaagcacagccgagtcaaggaggctagatactg

SEQ ID NO: 4575 - DNA, 36 bp, Artificial Sequence
  Synthetic oligonucleotide
gacatgcaagtcggagattatcaggactgggcgaca

SEQ ID NO: 4576 - DNA, 36 bp, Artificial Sequence
  Synthetic oligonucleotide
tacgcatgcacggaccgacatttcctgagttgcgaa

SEQ ID NO: 4577 - DNA, 36 bp, Artificial Sequence
  Synthetic oligonucleotide
gaccaaccggtgaggctgtagtagaagcttgttaaa

SEQ ID NO: 4578 - DNA, 35 bp, Artificial Sequence
  Synthetic oligonucleotide
gtcgcccacgatcaagcactgggagacagtcccaa

SEQ ID NO: 4579 - DNA, 35 bp, Artificial Sequence
  Synthetic oligonucleotide
tacgcacatcggtgggtaactgtacgtgaaaacca

SEQ ID NO: 4580 - DNA, 38 bp, Artificial Sequence
  Synthetic oligonucleotide
caaccctggccgaggtaccgaatgtgcattagggttga

SEQ ID NO: 4581 - DNA, 37 bp, Artificial Sequence
  Synthetic oligonucleotide
gccgagccttgcgatggcacgggtaggacatcatgga

SEQ ID NO: 4582 - DNA, 36 bp, Artificial Sequence
  Synthetic oligonucleotide
tccacaccagcaagaacgtgttaggcgagagcggga

SEQ ID NO: 4583 - DNA, 35 bp, Artificial Sequence
  Synthetic oligonucleotide
tgcgtactcccgaccccgcttaaccctacccacgc

SEQ ID NO: 4584 - DNA, 36 bp, Artificial Sequence
  Synthetic oligonucleotide
cggccatggcactcccgcattaaaagagtgtgagaa

SEQ ID NO: 4585 - DNA, 36 bp, Artificial Sequence
  Synthetic oligonucleotide
tccctccgctcactgaccccgaaaatcgctcccaca

SEQ ID NO: 4586 - DNA, 37 bp, Artificial Sequence
  Synthetic oligonucleotide
tcgtaagggcgcgtgtcgagaaatgaaaagaagtaga

SEQ ID NO: 4587 - DNA, 38 bp, Artificial Sequence
  Synthetic oligonucleotide
ccgagggagcacggtggtaagtttagagcaagggttga

SEQ ID NO: 4588 - DNA, 35 bp, Artificial Sequence
  Synthetic oligonucleotide
acccaagcccgcctcgaagcccacactattgacga

SEQ ID NO: 4589 - DNA, 35 bp, Artificial Sequence
  Synthetic oligonucleotide
gcagacacaacagtctatggtaccgatgattagca

SEQ ID NO: 4590 - DNA, 35 bp, Artificial Sequence
  Synthetic oligonucleotide
ggtgcgtaggccactgaccccgacatcggattacc

SEQ ID NO: 4591 - DNA, 35 bp, Artificial Sequence
  Synthetic oligonucleotide
acacgctccccgtccaagcttaagtccgctcagtt

SEQ ID NO: 4592 - DNA, 35 bp, Artificial Sequence
  Synthetic oligonucleotide
gcaccaagcccgccttttcttatccacagtagata

SEQ ID NO: 4593 - DNA, 36 bp, Artificial Sequence
  Synthetic oligonucleotide
accgaccccgactttcttttaatatcggcataccca

SEQ ID NO: 4594 - DNA, 37 bp, Artificial Sequence
  Synthetic oligonucleotide
gacacatgccgaatgagtctcgatggcatcgattcga

SEQ ID NO: 4595 - DNA, 35 bp, Artificial Sequence
  Synthetic oligonucleotide
agtaccgccacagctacaatcaacccaccagccac

SEQ ID NO: 4596 - DNA, 37 bp, Artificial Sequence
  Synthetic oligonucleotide
gacgacgcaacgggagggagggcacaacattcaacga

SEQ ID NO: 4597 - DNA, 35 bp, Artificial Sequence
  Synthetic oligonucleotide
acatgcggaggtgtaccatcttcatttcaggacgg

SEQ ID NO: 4598 - DNA, 37 bp, Artificial Sequence
  Synthetic oligonucleotide
tcaacgtgcgctcctccccccatccgcagttcatcga

SEQ ID NO: 4599 - DNA, 35 bp, Artificial Sequence
  Synthetic oligonucleotide
acccacgcagatcgcttactgtgtctgattcggaa

SEQ ID NO: 4600 - DNA, 35 bp, Artificial Sequence
  Synthetic oligonucleotide
gatgacgccacacatgcctttaatttccctattac

SEQ ID NO: 4601 - DNA, 35 bp, Artificial Sequence
  Synthetic oligonucleotide
tactgaccccgaaacatgccggaccccgtccactg

SEQ ID NO: 4602 - DNA, 35 bp, Artificial Sequence
  Synthetic oligonucleotide
ttcgccgcacagagtcgtataggacacaaatagcg

SEQ ID NO: 4603 - DNA, 38 bp, Artificial Sequence
  Synthetic oligonucleotide
gaagcacgcacattgatccgaaaactcgcagtcactga

SEQ ID NO: 4604 - DNA, 35 bp, Artificial Sequence
  Synthetic oligonucleotide
gccacagacagggcgggacatgcacttgctatact

SEQ ID NO: 4605 - DNA, 35 bp, Artificial Sequence
  Synthetic oligonucleotide
gacacgagctcctgccgacgtgaatcccggtgtca

SEQ ID NO: 4606 - DNA, 35 bp, Artificial Sequence
  Synthetic oligonucleotide
accatacgcaggcaaattatcaaagacgaactgtg

SEQ ID NO: 4607 - DNA, 36 bp, Artificial Sequence
  Synthetic oligonucleotide
tctggccctatcccgtcgacgtcgtatcaacgcaca

SEQ ID NO: 4608 - DNA, 38 bp, Artificial Sequence
  Synthetic oligonucleotide
acacgccaggaggtttgcgagctggacggcatgggtga

SEQ ID NO: 4609 - DNA, 36 bp, Artificial Sequence
  Synthetic oligonucleotide
gcccccgatcacactgcaacgtcacagaaccccgaa

SEQ ID NO: 4610 - DNA, 36 bp, Artificial Sequence
  Synthetic oligonucleotide
tacgacggacgcaatgcttcatgactgatctcttaa

SEQ ID NO: 4611 - DNA, 36 bp, Artificial Sequence
  Synthetic oligonucleotide
tgctacactgccagaggcatgggtatcctggtgtca

SEQ ID NO: 4612 - DNA, 36 bp, Artificial Sequence
  Synthetic oligonucleotide
tatccatcgcctgaccccgctttcttcaccgactga

SEQ ID NO: 4613 - DNA, 35 bp, Artificial Sequence
  Synthetic oligonucleotide
tgccgcttagacccccagacaaggagaatgctata

SEQ ID NO: 4614 - DNA, 35 bp, Artificial Sequence
  Synthetic oligonucleotide
gcaaacggactgggcggctgtagtgcatgacagtc

SEQ ID NO: 4615 - DNA, 35 bp, Artificial Sequence
  Synthetic oligonucleotide
tcaacacgggcgcacggtgatcaatcggtttacta

SEQ ID NO: 4616 - DNA, 37 bp, Artificial Sequence
  Synthetic oligonucleotide
gacgcatcacatgctatgtaaggctactcgagcgcga

SEQ ID NO: 4617 - DNA, 36 bp, Artificial Sequence
  Synthetic oligonucleotide
acccaacgggaagtcaagcggcggacccccacatta

SEQ ID NO: 4618 - DNA, 37 bp, Artificial Sequence
  Synthetic oligonucleotide
gcgaccgagtaacaccgccactgaccccgaatttaga

SEQ ID NO: 4619 - DNA, 36 bp, Artificial Sequence
  Synthetic oligonucleotide
acctacaccgaccccgatacactttgccatgttaga

SEQ ID NO: 4620 - DNA, 35 bp, Artificial Sequence
  Synthetic oligonucleotide
ggtgacacgcagtagtgcgcagtcacagttacacg

SEQ ID NO: 4621 - DNA, 35 bp, Artificial Sequence
  Synthetic oligonucleotide
actccctaacccgaccccgtccattaccgctgacc

SEQ ID NO: 4622 - DNA, 37 bp, Artificial Sequence
  Synthetic oligonucleotide
gccaccccaatcgctccaagccggcacctctcgtgga

SEQ ID NO: 4623 - DNA, 36 bp, Artificial Sequence
  Synthetic oligonucleotide
gctcaggtcggcttgtgactaacgacacgtggggta

SEQ ID NO: 4624 - DNA, 35 bp, Artificial Sequence
  Synthetic oligonucleotide
gccaacggcgagactgtgttgcatgacccacctta

SEQ ID NO: 4625 - DNA, 36 bp, Artificial Sequence
  Synthetic oligonucleotide
aactgcgcagcttccgacccccaggcattgaattca

SEQ ID NO: 4626 - DNA, 37 bp, Artificial Sequence
  Synthetic oligonucleotide
tcctgaccagttcagtctcaggtatagtcgagactga

SEQ ID NO: 4627 - DNA, 37 bp, Artificial Sequence
  Synthetic oligonucleotide
ggtgacgagagagccgctctagaagcaccctacgttg

SEQ ID NO: 4628 - DNA, 35 bp, Artificial Sequence
  Synthetic oligonucleotide
gcacgccgaagcaaacacagctaccacttttcgcc

SEQ ID NO: 4629 - DNA, 35 bp, Artificial Sequence
  Synthetic oligonucleotide
gccactgaccccgccttgaatatcacgttaataga

SEQ ID NO: 4630 - DNA, 35 bp, Artificial Sequence
  Synthetic oligonucleotide
gtcgatgacccgttcgcgaaccactgaccccgatc

SEQ ID NO: 4631 - DNA, 36 bp, Artificial Sequence
  Synthetic oligonucleotide
ttgccgcccccattgtattccgtacgtccaactcaa

SEQ ID NO: 4632 - DNA, 35 bp, Artificial Sequence
  Synthetic oligonucleotide
acaaaccgtgtacagacccccagaccgcacaagtg

SEQ ID NO: 4633 - DNA, 37 bp, Artificial Sequence
  Synthetic oligonucleotide
gagccgcgaggcgaacagagatctagtactggctgga

SEQ ID NO: 4634 - DNA, 35 bp, Artificial Sequence
  Synthetic oligonucleotide
atgcacaccgttcgccctgattctaatcgctatat

SEQ ID NO: 4635 - DNA, 36 bp, Artificial Sequence
  Synthetic oligonucleotide
gcacatccacgaacccaccatagcccagtacgcaca

SEQ ID NO: 4636 - DNA, 35 bp, Artificial Sequence
  Synthetic oligonucleotide
gccaaccaccgaatacgtatcaacactcatctcgt

SEQ ID NO: 4637 - DNA, 35 bp, Artificial Sequence
  Synthetic oligonucleotide
accttgaccactgaccccgatagtctatactcaca

SEQ ID NO: 4638 - DNA, 36 bp, Artificial Sequence
  Synthetic oligonucleotide
gaccgcccagtccgtccccaggtccctagtcgctta

SEQ ID NO: 4639 - DNA, 35 bp, Artificial Sequence
  Synthetic oligonucleotide
gactagcccaccactcttatattgatcggccctcg

SEQ ID NO: 4640 - DNA, 37 bp, Artificial Sequence
  Synthetic oligonucleotide
tcacgaaccccaactactgaccccgcctcgaaccgga

SEQ ID NO: 4641 - DNA, 36 bp, Artificial Sequence
  Synthetic oligonucleotide
gcaacccgctgcacacaggcataaaacgtacaacta

SEQ ID NO: 4642 - DNA, 35 bp, Artificial Sequence
  Synthetic oligonucleotide
gatccaaccgtcaagctctcgaccgctctccgcaa

SEQ ID NO: 4643 - DNA, 35 bp, Artificial Sequence
  Synthetic oligonucleotide
gaaaccatcgcaccgagttgttgacgtctcgtagc

SEQ ID NO: 4644 - DNA, 35 bp, Artificial Sequence
  Synthetic oligonucleotide
tactcggaggcggaaggggtggtggatggttttgt

SEQ ID NO: 4645 - DNA, 37 bp, Artificial Sequence
  Synthetic oligonucleotide
agaccccgcacacaggccacggaagatcagtaggcga

SEQ ID NO: 4646 - DNA, 36 bp, Artificial Sequence
  Synthetic oligonucleotide
gacgcaccagcacacggtctcggtctcgtaggtcca

SEQ ID NO: 4647 - DNA, 35 bp, Artificial Sequence
  Synthetic oligonucleotide
acacccgtacctccacaccgcatacgcgttagcct

SEQ ID NO: 4648 - DNA, 38 bp, Artificial Sequence
  Synthetic oligonucleotide
accacacagaccgcatagagacgttgtgagtactatga

SEQ ID NO: 4649 - DNA, 35 bp, Artificial Sequence
  Synthetic oligonucleotide
agtctgacgcacccactgaccccgaacttcccgga

SEQ ID NO: 4650 - DNA, 36 bp, Artificial Sequence
  Synthetic oligonucleotide
tacagctgcatactgaccccgcttctacacttgtga

SEQ ID NO: 4651 - DNA, 35 bp, Artificial Sequence
  Synthetic oligonucleotide
gacgacggagcagaggccacgttgttgcacattct

SEQ ID NO: 4652 - DNA, 35 bp, Artificial Sequence
  Synthetic oligonucleotide
tgcgacgacaactgtacggttctcaacctgtggtt

SEQ ID NO: 4653 - DNA, 35 bp, Artificial Sequence
  Synthetic oligonucleotide
gatgcgcacggggtaattcggttcgacggaaatta

SEQ ID NO: 4654 - DNA, 36 bp, Artificial Sequence
  Synthetic oligonucleotide
tgaaccgccgcccactacgctcccgtgcctgcatta

SEQ ID NO: 4655 - DNA, 37 bp, Artificial Sequence
  Synthetic oligonucleotide
gcacgaaccccaactactgaccccgcctcgaaccgaa

SEQ ID NO: 4656 - DNA, 36 bp, Artificial Sequence
  Synthetic oligonucleotide
aacgacggctgtcccaagagcatgtcgtgtcgcaca

SEQ ID NO: 4657 - DNA, 36 bp, Artificial Sequence
  Synthetic oligonucleotide
acctacgcccaaccccgttgtcctcaaacccgagga

SEQ ID NO: 4658 - DNA, 38 bp, Artificial Sequence
  Synthetic oligonucleotide
ccatccgagcgggcgcgaccaggtttcaagagcactga

SEQ ID NO: 4659 - DNA, 35 bp, Artificial Sequence
  Synthetic oligonucleotide
gccatggtctcacgcgggacgcgcatgatctcact

SEQ ID NO: 4660 - DNA, 35 bp, Artificial Sequence
  Synthetic oligonucleotide
acagccccagctgtaggaggaggccccagccgcac

SEQ ID NO: 4661 - DNA, 35 bp, Artificial Sequence
  Synthetic oligonucleotide
gatgcacgcgggaggctacttagacccgattacac

SEQ ID NO: 4662 - DNA, 38 bp, Artificial Sequence
  Synthetic oligonucleotide
ggacacgcacgaggcctgaactaacctagccaccgtga

SEQ ID NO: 4663 - DNA, 38 bp, Artificial Sequence
  Synthetic oligonucleotide
tgaccccgcatgaccatgacctaccaccgtactcgtga

SEQ ID NO: 4664 - DNA, 35 bp, Artificial Sequence
  Synthetic oligonucleotide
gatgcgcacaaccagtcaattcgtgaacacgccct

SEQ ID NO: 4665 - DNA, 35 bp, Artificial Sequence
  Synthetic oligonucleotide
tacgcaccaaacacggtcggtcgacgccccttact

SEQ ID NO: 4666 - DNA, 36 bp, Artificial Sequence
  Synthetic oligonucleotide
tcaaaagtcagtcccaacaccatggtcccaaccata

SEQ ID NO: 4667 - DNA, 36 bp, Artificial Sequence
  Synthetic oligonucleotide
gtgccatacgtcgaaccgcatcaacgcaaccattca

SEQ ID NO: 4668 - DNA, 37 bp, Artificial Sequence
  Synthetic oligonucleotide
tgcggggttgggtcgtggcgggctgcataattggaga

SEQ ID NO: 4669 - DNA, 35 bp, Artificial Sequence
  Synthetic oligonucleotide
tccaactgcgtcaacgacttgccactgaccccgaa

SEQ ID NO: 4670 - DNA, 35 bp, Artificial Sequence
  Synthetic oligonucleotide
gcgccccccactgaccccgagaccaggaattgtta

SEQ ID NO: 4671 - DNA, 35 bp, Artificial Sequence
  Synthetic oligonucleotide
accccatctgcaggtgagcgcccccgaccgcaaac

SEQ ID NO: 4672 - DNA, 35 bp, Artificial Sequence
  Synthetic oligonucleotide
tgcagattcccaaatctgttacccccaggtattgg

SEQ ID NO: 4673 - DNA, 35 bp, Artificial Sequence
  Synthetic oligonucleotide
aaccaccgccacacgatacgcctctacatcccttt

SEQ ID NO: 4674 - DNA, 36 bp, Artificial Sequence
  Synthetic oligonucleotide
gatccacgctgcacttgccccacgctctgcctgtta

SEQ ID NO: 4675 - DNA, 38 bp, Artificial Sequence
  Synthetic oligonucleotide
tgactagcggcagtccctcaacatggccgtccctttca

SEQ ID NO: 4676 - DNA, 35 bp, Artificial Sequence
  Synthetic oligonucleotide
tactgaccccgaaacctgccggaccccgtccactt

SEQ ID NO: 4677 - DNA, 35 bp, Artificial Sequence
  Synthetic oligonucleotide
acacactgcatcggaggtcttaataaagagcttaa

SEQ ID NO: 4678 - DNA, 37 bp, Artificial Sequence
  Synthetic oligonucleotide
accacaccagcaccgcactattccgactcagttatga

SEQ ID NO: 4679 - DNA, 37 bp, Artificial Sequence
  Synthetic oligonucleotide
ccacacgcacgacgaggagtttggaaacagcttagga

SEQ ID NO: 4680 - DNA, 37 bp, Artificial Sequence
  Synthetic oligonucleotide
gcacaaggcccgttcccgcccgtcgattgttatgcga

SEQ ID NO: 4681 - DNA, 35 bp, Artificial Sequence
  Synthetic oligonucleotide
attgctgtcgcgaactgaccccgatgattagcctg

SEQ ID NO: 4682 - DNA, 35 bp, Artificial Sequence
  Synthetic oligonucleotide
gcaacccgcatcttaccgttaacgtaccgcacgca

SEQ ID NO: 4683 - DNA, 34 bp, Artificial Sequence
  Synthetic oligonucleotide
aacacgcacgcgcatatgcctaaccgtaagtggg

SEQ ID NO: 4684 - DNA, 36 bp, Artificial Sequence
  Synthetic oligonucleotide
gacacacactgcacgggttgaagcaatgcatgctta

SEQ ID NO: 4685 - DNA, 35 bp, Artificial Sequence
  Synthetic oligonucleotide
gccacaccgatcgcactcaacgccttaccactaat

SEQ ID NO: 4686 - DNA, 35 bp, Artificial Sequence
  Synthetic oligonucleotide
accccgcacatggaacatcgacctacaacccgacc

SEQ ID NO: 4687 - DNA, 35 bp, Artificial Sequence
  Synthetic oligonucleotide
actgaccccgactccttcttcccgctagcagtatg

SEQ ID NO: 4688 - DNA, 36 bp, Artificial Sequence
  Synthetic oligonucleotide
gaggacgtgaagtattcttgagggacacgtggggta

SEQ ID NO: 4689 - DNA, 35 bp, Artificial Sequence
  Synthetic oligonucleotide
tactgaccccgaaaccttccggaccccgtccactg

SEQ ID NO: 4690 - DNA, 36 bp, Artificial Sequence
  Synthetic oligonucleotide
acacctccctcaaggcggaccccgttctaccccgga

SEQ ID NO: 4691 - DNA, 37 bp, Artificial Sequence
  Synthetic oligonucleotide
gacgccccagcgcacgggagcgcactccccaacacga

SEQ ID NO: 4692 - DNA, 35 bp, Artificial Sequence
  Synthetic oligonucleotide
acatacagctccggacccagcctactcacacaacc

SEQ ID NO: 4693 - DNA, 37 bp, Artificial Sequence
  Synthetic oligonucleotide
actccacccgccggagcgcaattcgccctgaccccga

SEQ ID NO: 4694 - DNA, 34 bp, Artificial Sequence
  Synthetic oligonucleotide
gcccgaccccaaccccggtggatataaacaggac

SEQ ID NO: 4695 - DNA, 38 bp, Artificial Sequence
  Synthetic oligonucleotide
gccaactacccacacgccattagattacagctcgttga

SEQ ID NO: 4696 - DNA, 35 bp, Artificial Sequence
  Synthetic oligonucleotide
tgcgaccggtagggagaccccggtgtcctatgagg

SEQ ID NO: 4697 - DNA, 36 bp, Artificial Sequence
  Synthetic oligonucleotide
acgaaccgccactcgccttaatttggtacactacaa

SEQ ID NO: 4698 - DNA, 35 bp, Artificial Sequence
  Synthetic oligonucleotide
agtcaagcccactcgtcttatgattcccatctatc

SEQ ID NO: 4699 - DNA, 35 bp, Artificial Sequence
  Synthetic oligonucleotide
accgaccccgccctaattgcgcccctcctaactga

SEQ ID NO: 4700 - DNA, 36 bp, Artificial Sequence
  Synthetic oligonucleotide
gacacgccaaagtacaaaccgatcttcaaatactga

SEQ ID NO: 4701 - DNA, 38 bp, Artificial Sequence
  Synthetic oligonucleotide
acccgccaccctaaccattaagcagacagcatgtctga

SEQ ID NO: 4702 - DNA, 38 bp, Artificial Sequence
  Synthetic oligonucleotide
aagaccagcgcacctaccgaccccgacctcatgcttga

SEQ ID NO: 4703 - DNA, 36 bp, Artificial Sequence
  Synthetic oligonucleotide
tacacgcataccaccgtccttgcatcctcatttaca

SEQ ID NO: 4704 - DNA, 38 bp, Artificial Sequence
  Synthetic oligonucleotide
actgaccccgaaatgaccccgttcttgacgtgcgctga

SEQ ID NO: 4705 - DNA, 37 bp, Artificial Sequence
  Synthetic oligonucleotide
acacgcgcattacacgaaatgtagaaagtactatcga

SEQ ID NO: 4706 - DNA, 37 bp, Artificial Sequence
  Synthetic oligonucleotide
gagggcggagcaccagtaggtcatgagacatggggga

SEQ ID NO: 4707 - DNA, 38 bp, Artificial Sequence
  Synthetic oligonucleotide
acacgaccagtgcgacgtggccacaacttacctcttga

SEQ ID NO: 4708 - DNA, 37 bp, Artificial Sequence
  Synthetic oligonucleotide
tcaaccgcaacaccaccgcccgagccacgtcgagtga

SEQ ID NO: 4709 - DNA, 36 bp, Artificial Sequence
  Synthetic oligonucleotide
cacactgcccggatcgccaaaagtccagggagccca

SEQ ID NO: 4710 - DNA, 35 bp, Artificial Sequence
  Synthetic oligonucleotide
gaccaaccgatacacacagaccccgacttcctacc

SEQ ID NO: 4711 - DNA, 37 bp, Artificial Sequence
  Synthetic oligonucleotide
gacgagaggggtagagcgaaagaaaccgttggtgaga

SEQ ID NO: 4712 - DNA, 35 bp, Artificial Sequence
  Synthetic oligonucleotide
tgcgtgctactgaccccgcaaagcccatcccctga

SEQ ID NO: 4713 - DNA, 36 bp, Artificial Sequence
  Synthetic oligonucleotide
accccgaacacggtagtcagtgaacacggaccccga

SEQ ID NO: 4714 - DNA, 38 bp, Artificial Sequence
  Synthetic oligonucleotide
gtgaccccaaagtcacgcgtacagtccattactaatga

SEQ ID NO: 4715 - DNA, 35 bp, Artificial Sequence
  Synthetic oligonucleotide
atgcacacccgtctatacgtgccatgtccccattt

SEQ ID NO: 4716 - DNA, 36 bp, Artificial Sequence
  Synthetic oligonucleotide
gatgcgtacgtgcacccgaagacgtgtcacgctcca

SEQ ID NO: 4717 - DNA, 35 bp, Artificial Sequence
  Synthetic oligonucleotide
taaccaccccagttgttacttgcatgtccagctgc

SEQ ID NO: 4718 - DNA, 35 bp, Artificial Sequence
  Synthetic oligonucleotide
accaccgctgtccgcatagtgaacctcctcactgt

SEQ ID NO: 4719 - DNA, 37 bp, Artificial Sequence
  Synthetic oligonucleotide
tcaccccgcacctataattatgaccccgacctgccca

SEQ ID NO: 4720 - DNA, 38 bp, Artificial Sequence
  Synthetic oligonucleotide
tccctcaccgccctcgaaccagaatcatcatacgttga

SEQ ID NO: 4721 - DNA, 38 bp, Artificial Sequence
  Synthetic oligonucleotide
tcacgcaacagaactggatgaatcgttggtggtactga

SEQ ID NO: 4722 - DNA, 37 bp, Artificial Sequence
  Synthetic oligonucleotide
gaacgcaccccgtcattattaccgcacttgaccccga

SEQ ID NO: 4723 - DNA, 35 bp, Artificial Sequence
  Synthetic oligonucleotide
gcactgaccccgcttggatccacccgtttttgcca

SEQ ID NO: 4724 - DNA, 35 bp, Artificial Sequence
  Synthetic oligonucleotide
gactacggacccaatgcactgcgaaccttacatcc

SEQ ID NO: 4725 - DNA, 36 bp, Artificial Sequence
  Synthetic oligonucleotide
gtccaaccccgtaacgcgcgtctcccaaacccccaa

SEQ ID NO: 4726 - DNA, 38 bp, Artificial Sequence
  Synthetic oligonucleotide
gaggacaggtgcaagtattaagaaagatcacgatatga

SEQ ID NO: 4727 - DNA, 35 bp, Artificial Sequence
  Synthetic oligonucleotide
gccagaaagcgcgtagtgatgacgacttaaataac

SEQ ID NO: 4728 - DNA, 36 bp, Artificial Sequence
  Synthetic oligonucleotide
gtgaccgaacgagtgcagtgagggagtagcttacta

SEQ ID NO: 4729 - DNA, 38 bp, Artificial Sequence
  Synthetic oligonucleotide
gaacgcgcgatgtggacagagattcatgttgggactga

SEQ ID NO: 4730 - DNA, 36 bp, Artificial Sequence
  Synthetic oligonucleotide
gcgacccgcaaccgcccattagacatcccactggaa

SEQ ID NO: 4731 - DNA, 38 bp, Artificial Sequence
  Synthetic oligonucleotide
gcaaccgcatgttcccacagcatgtccacttcgactga

SEQ ID NO: 4732 - DNA, 38 bp, Artificial Sequence
  Synthetic oligonucleotide
atgcacagccggtgttaaatcacgagaggaagaactga

SEQ ID NO: 4733 - DNA, 38 bp, Artificial Sequence
  Synthetic oligonucleotide
gacaccaacaggatggagggtgggtgtaacgtcgatga

SEQ ID NO: 4734 - DNA, 36 bp, Artificial Sequence
  Synthetic oligonucleotide
tacgcaccagtcggtgtgtaaattgcaaagtcaaca

SEQ ID NO: 4735 - DNA, 35 bp, Artificial Sequence
  Synthetic oligonucleotide
tactgaccccgaaacctgccggaccccgtccacag

SEQ ID NO: 4736 - DNA, 36 bp, Artificial Sequence
  Synthetic oligonucleotide
tccagccgcaattccgtttgcagatcaccccgatca

SEQ ID NO: 4737 - DNA, 36 bp, Artificial Sequence
  Synthetic oligonucleotide
gacgccccgccacccatagttcctagacagcctcca

SEQ ID NO: 4738 - DNA, 37 bp, Artificial Sequence
  Synthetic oligonucleotide
agacgaggcggacccccagacagatcgctagaataaa

SEQ ID NO: 4739 - DNA, 35 bp, Artificial Sequence
  Synthetic oligonucleotide
gacgcctgccgacacggtgagtacgcggttggtcg

SEQ ID NO: 4740 - DNA, 37 bp, Artificial Sequence
  Synthetic oligonucleotide
tgacaaccgcatatactaccccaacatacctatggga

SEQ ID NO: 4741 - DNA, 38 bp, Artificial Sequence
  Synthetic oligonucleotide
gtgtgcacgggcaacgtgaaattggatcaatcttatga

SEQ ID NO: 4742 - DNA, 35 bp, Artificial Sequence
  Synthetic oligonucleotide
taaagcaaggacccccagactgactgatacacgct

SEQ ID NO: 4743 - DNA, 37 bp, Artificial Sequence
  Synthetic oligonucleotide
tacatgcacaggtgacgcaacctacgacggttcacga

SEQ ID NO: 4744 - DNA, 35 bp, Artificial Sequence
  Synthetic oligonucleotide
tgcaccccaaggcgaacattgcctatcatgacgaa

SEQ ID NO: 4745 - DNA, 35 bp, Artificial Sequence
  Synthetic oligonucleotide
tacacgcgtagaccgacaagtacgctgcttggagc

SEQ ID NO: 4746 - DNA, 34 bp, Artificial Sequence
  Synthetic oligonucleotide
gacgatggcgtacagaccatggcatcgttgacct

SEQ ID NO: 4747 - DNA, 36 bp, Artificial Sequence
  Synthetic oligonucleotide
tacaacgacacaccgataagggaagcaatggtagta

SEQ ID NO: 4748 - DNA, 35 bp, Artificial Sequence
  Synthetic oligonucleotide
accaccgcaaaagtgggtttacaggcaatcctggc

SEQ ID NO: 4749 - DNA, 36 bp, Artificial Sequence
  Synthetic oligonucleotide
actgaccccgagagccgcatgttgttgacgatagga

SEQ ID NO: 4750 - DNA, 35 bp, Artificial Sequence
  Synthetic oligonucleotide
cacccgccccgttcctctgttacacacccgccatc

SEQ ID NO: 4751 - DNA, 36 bp, Artificial Sequence
  Synthetic oligonucleotide
gaccaccgaaatgcgcctcaaggatcgtcaattgga

SEQ ID NO: 4752 - DNA, 36 bp, Artificial Sequence
  Synthetic oligonucleotide
gcaccgccaaacacacttaaagccaattggtcacca

SEQ ID NO: 4753 - DNA, 37 bp, Artificial Sequence
  Synthetic oligonucleotide
tcaggcacaggaagcccccacagtcgaatacgctcga

SEQ ID NO: 4754 - DNA, 37 bp, Artificial Sequence
  Synthetic oligonucleotide
gtcacaccgcagctcagacccccagacattctgtcta

SEQ ID NO: 4755 - DNA, 36 bp, Artificial Sequence
  Synthetic oligonucleotide
acacaccagagccacttatgcagtcacacttgatta

SEQ ID NO: 4756 - DNA, 35 bp, Artificial Sequence
  Synthetic oligonucleotide
tatgctggccgaggaatgctacatcaccaccattt

SEQ ID NO: 4757 - DNA, 38 bp, Artificial Sequence
  Synthetic oligonucleotide
gatgacaacagtcagcacggtatgaacagcaggagtga

SEQ ID NO: 4758 - DNA, 35 bp, Artificial Sequence
  Synthetic oligonucleotide
gcacaacggtcactcaccgaccccgactcttgaac

SEQ ID NO: 4759 - DNA, 37 bp, Artificial Sequence
  Synthetic oligonucleotide
gctgacaaagcgcggactgcacggagctttgatcaga

SEQ ID NO: 4760 - DNA, 36 bp, Artificial Sequence
  Synthetic oligonucleotide
tgaccgcacaatgaccccagtcagtacgcgagtcta

SEQ ID NO: 4761 - DNA, 35 bp, Artificial Sequence
  Synthetic oligonucleotide
tccactgaccccgttgttttgctgaatacatgcac

SEQ ID NO: 4762 - DNA, 35 bp, Artificial Sequence
  Synthetic oligonucleotide
gcaccggatgcgccacactcgcatcggacaaagtc

SEQ ID NO: 4763 - DNA, 35 bp, Artificial Sequence
  Synthetic oligonucleotide
tatgcaaccacagcagtacttaaatcgtacccgta

SEQ ID NO: 4764 - DNA, 35 bp, Artificial Sequence
  Synthetic oligonucleotide
tcacgggagggagggtaaggggcttgatcaaggtg

SEQ ID NO: 4765 - DNA, 38 bp, Artificial Sequence
  Synthetic oligonucleotide
gagccgaacaggtacgagtcggttagcctgttgtatga

SEQ ID NO: 4766 - DNA, 35 bp, Artificial Sequence
  Synthetic oligonucleotide
cctaaccgcaccgtttgttcctttgtgcttatcgg

SEQ ID NO: 4767 - DNA, 36 bp, Artificial Sequence
  Synthetic oligonucleotide
gacacgcaaaggaggataggtgcactattaacatga

SEQ ID NO: 4768 - DNA, 35 bp, Artificial Sequence
  Synthetic oligonucleotide
acaaccctgcgccatgaaacagatatgaggccgcc

SEQ ID NO: 4769 - DNA, 36 bp, Artificial Sequence
  Synthetic oligonucleotide
tgccgacgcagcactagtaactcacaccactccaga

SEQ ID NO: 4770 - DNA, 36 bp, Artificial Sequence
  Synthetic oligonucleotide
gcataccgcagtagtacggacatggggctagatcaa

SEQ ID NO: 4771 - DNA, 38 bp, Artificial Sequence
  Synthetic oligonucleotide
tacacagcccggcaagcaaggaacgaggggtcttgtga

SEQ ID NO: 4772 - DNA, 37 bp, Artificial Sequence
  Synthetic oligonucleotide
gaagcacaaggtaggtctaacgggagtcaaggaggga

SEQ ID NO: 4773 - DNA, 36 bp, Artificial Sequence
  Synthetic oligonucleotide
gtgcgatcccagacgaacagtattcgaccaccacga

SEQ ID NO: 4774 - DNA, 36 bp, Artificial Sequence
  Synthetic oligonucleotide
tagtcacgcgggaggaatatatgagggacgacaaca

SEQ ID NO: 4775 - DNA, 34 bp, Artificial Sequence
  Synthetic oligonucleotide
tccgtccgtcccactcctgaccccgacttgacta

SEQ ID NO: 4776 - DNA, 36 bp, Artificial Sequence
  Synthetic oligonucleotide
acgtcccacccggtgtcactgtggcactaccataaa

SEQ ID NO: 4777 - DNA, 36 bp, Artificial Sequence
  Synthetic oligonucleotide
tacacacacccagcctgcagactatcaattgtttca

SEQ ID NO: 4778 - DNA, 36 bp, Artificial Sequence
  Synthetic oligonucleotide
gacaaggccagatatggatccttgaacgtctcggta

SEQ ID NO: 4779 - DNA, 36 bp, Artificial Sequence
  Synthetic oligonucleotide
agttcgtgcgcctacagacctaatactgaccccgaa

SEQ ID NO: 4780 - DNA, 35 bp, Artificial Sequence
  Synthetic oligonucleotide
tacgacgcagtccatcctaatgcccaccctcatac

SEQ ID NO: 4781 - DNA, 37 bp, Artificial Sequence
  Synthetic oligonucleotide
gacagtgcaggtagatcaatgaccagagaagaaccga

SEQ ID NO: 4782 - DNA, 36 bp, Artificial Sequence
  Synthetic oligonucleotide
atcgtgcgaagacccccagacattagactatactca

SEQ ID NO: 4783 - DNA, 37 bp, Artificial Sequence
  Synthetic oligonucleotide
tgacacacactgaacgtatgtgtagcccggtgtctga

SEQ ID NO: 4784 - DNA, 35 bp, Artificial Sequence
  Synthetic oligonucleotide
tagtgctgcagtactacccgttttgaacatcgtcc

SEQ ID NO: 4785 - DNA, 36 bp, Artificial Sequence
  Synthetic oligonucleotide
gacgaacgcagattatgcctccccatttccttctta

SEQ ID NO: 4786 - DNA, 35 bp, Artificial Sequence
  Synthetic oligonucleotide
actgccaccgctgctgtacccccgtttccattcta

SEQ ID NO: 4787 - DNA, 37 bp, Artificial Sequence
  Synthetic oligonucleotide
gacccccccccaggcccataacgagcaagtccccaga

SEQ ID NO: 4788 - DNA, 35 bp, Artificial Sequence
  Synthetic oligonucleotide
tgacacaaggcacctccaagtctatgttcacgtta

SEQ ID NO: 4789 - DNA, 35 bp, Artificial Sequence
  Synthetic oligonucleotide
tactgaccccgaaacctgcaggaccccgtccactg

SEQ ID NO: 4790 - DNA, 38 bp, Artificial Sequence
  Synthetic oligonucleotide
aacaccacgtaccagtgcagaagcaaacaatcgattga

SEQ ID NO: 4791 - DNA, 35 bp, Artificial Sequence
  Synthetic oligonucleotide
acacctgcaggccgcgaaccgatacaccgaccccg

SEQ ID NO: 4792 - DNA, 38 bp, Artificial Sequence
  Synthetic oligonucleotide
gtggtcgcacagaaaaacacactggttacacataatga

SEQ ID NO: 4793 - DNA, 38 bp, Artificial Sequence
  Synthetic oligonucleotide
gagccaccagccagagagtgtaaacgtgtttacattga

SEQ ID NO: 4794 - DNA, 37 bp, Artificial Sequence
  Synthetic oligonucleotide
gtcgaaccgccccaccgaacctgtatacatcccttga

SEQ ID NO: 4795 - DNA, 35 bp, Artificial Sequence
  Synthetic oligonucleotide
gttgagcgcaaaacaccacttctcagccggatccg

SEQ ID NO: 4796 - DNA, 38 bp, Artificial Sequence
  Synthetic oligonucleotide
tgcccgcgagtaaactcgagggacctggtgtcacatga

SEQ ID NO: 4797 - DNA, 37 bp, Artificial Sequence
  Synthetic oligonucleotide
ccaccgcccggtagcacgttctccgctacaccatgga

SEQ ID NO: 4798 - DNA, 37 bp, Artificial Sequence
  Synthetic oligonucleotide
atcaccaccacagcattctcgacggagcattctatga

SEQ ID NO: 4799 - DNA, 35 bp, Artificial Sequence
  Synthetic oligonucleotide
gacatcgcaaagtctgtataaattacggcttggac

SEQ ID NO: 4800 - DNA, 35 bp, Artificial Sequence
  Synthetic oligonucleotide
gacgacaggggacaagcttgtacgtatagaaacgt

SEQ ID NO: 4801 - DNA, 36 bp, Artificial Sequence
  Synthetic oligonucleotide
gccacggcccacacatccacagtacgtcccaatgta

SEQ ID NO: 4802 - DNA, 38 bp, Artificial Sequence
  Synthetic oligonucleotide
acatccattacgtccagacccactcgcagtccatgtga

SEQ ID NO: 4803 - DNA, 35 bp, Artificial Sequence
  Synthetic oligonucleotide
aacaccagcccttgccaatactgctgcacgcatac

SEQ ID NO: 4804 - DNA, 36 bp, Artificial Sequence
  Synthetic oligonucleotide
tactgaccctgatgtattctaaccccgctacgtcga

SEQ ID NO: 4805 - DNA, 35 bp, Artificial Sequence
  Synthetic oligonucleotide
accacacgccacattacgtctactcgtcacttggg

SEQ ID NO: 4806 - DNA, 37 bp, Artificial Sequence
  Synthetic oligonucleotide
tgtcactgtctgacccccaggcagtcgaattaccgga

SEQ ID NO: 4807 - DNA, 35 bp, Artificial Sequence
  Synthetic oligonucleotide
tgaaccccgctaactgagtcgtacattaccccgtt

SEQ ID NO: 4808 - DNA, 36 bp, Artificial Sequence
  Synthetic oligonucleotide
gaccgcacagtcgaataccgtttcaagtctaacgga

SEQ ID NO: 4809 - DNA, 36 bp, Artificial Sequence
  Synthetic oligonucleotide
tcacaccccagtccttgcatactcagattgtaatca

SEQ ID NO: 4810 - DNA, 35 bp, Artificial Sequence
  Synthetic oligonucleotide
acatgcgcatggcctcacaggaggaggggtctctc

SEQ ID NO: 4811 - DNA, 35 bp, Artificial Sequence
  Synthetic oligonucleotide
aaacaccgcacggacgttcaggaccagtcatatcg

SEQ ID NO: 4812 - DNA, 36 bp, Artificial Sequence
  Synthetic oligonucleotide
acacgcacagcaaggatttaagtttagtactgcaaa

SEQ ID NO: 4813 - DNA, 35 bp, Artificial Sequence
  Synthetic oligonucleotide
tcacacccgctcgatcgaaagtcgcgatttgtggg

SEQ ID NO: 4814 - DNA, 36 bp, Artificial Sequence
  Synthetic oligonucleotide
tgaagaaacgaccccagtggtttgtcctcccaagga

SEQ ID NO: 4815 - DNA, 37 bp, Artificial Sequence
  Synthetic oligonucleotide
gcctagcccactatccttaatcccgcagtcggaagga

SEQ ID NO: 4816 - DNA, 35 bp, Artificial Sequence
  Synthetic oligonucleotide
tgaccacgcaagtcgttttcagtgttctccaaacc

SEQ ID NO: 4817 - DNA, 38 bp, Artificial Sequence
  Synthetic oligonucleotide
aacgaagctgagatcagacggctgtcaaagaggcatga

SEQ ID NO: 4818 - DNA, 37 bp, Artificial Sequence
  Synthetic oligonucleotide
acacgcaaaacggcaaactgtaaggacgtgaacggga

SEQ ID NO: 4819 - DNA, 35 bp, Artificial Sequence
  Synthetic oligonucleotide
gacacctgaggcacgggacacaacaccactaatac

SEQ ID NO: 4820 - DNA, 38 bp, Artificial Sequence
  Synthetic oligonucleotide
gttgaccgggctcgggtgtccagcgcgggtcatagtga

SEQ ID NO: 4821 - DNA, 38 bp, Artificial Sequence
  Synthetic oligonucleotide
cgcccaagtcagtcctcgaaagacggagagcctcttga

SEQ ID NO: 4822 - DNA, 36 bp, Artificial Sequence
  Synthetic oligonucleotide
gcctcgccggggtccacagagtgccggggtgagaaa

SEQ ID NO: 4823 - DNA, 36 bp, Artificial Sequence
  Synthetic oligonucleotide
acccgcacaggtcgtggatttggggtaagatagcta

SEQ ID NO: 4824 - DNA, 35 bp, Artificial Sequence
  Synthetic oligonucleotide
gtccccaggtatagtcggggacagccaggtactcc

SEQ ID NO: 4825 - DNA, 36 bp, Artificial Sequence
  Synthetic oligonucleotide
gtgcccaccctaagctttaacgatcccagtcgaaca

SEQ ID NO: 4826 - DNA, 37 bp, Artificial Sequence
  Synthetic oligonucleotide
gaaccactccacacagactgtcaccactttgaagtga

SEQ ID NO: 4827 - DNA, 38 bp, Artificial Sequence
  Synthetic oligonucleotide
gcccaccccacgcccgtagtaggacctttgtaccttga

SEQ ID NO: 4828 - DNA, 37 bp, Artificial Sequence
  Synthetic oligonucleotide
gatgacgggccgcaacgcgaaggaggtcaaggacaga

SEQ ID NO: 4829 - DNA, 35 bp, Artificial Sequence
  Synthetic oligonucleotide
tgcgagtaccctcactgaccccgcccattagttga

SEQ ID NO: 4830 - DNA, 36 bp, Artificial Sequence
  Synthetic oligonucleotide
acccaactagcaccacgcctcctacacgtcccggga

SEQ ID NO: 4831 - DNA, 35 bp, Artificial Sequence
  Synthetic oligonucleotide
accaagcccgccacttcaaaaacccctcactgaac

SEQ ID NO: 4832 - DNA, 36 bp, Artificial Sequence
  Synthetic oligonucleotide
gagcaccccgtcgacgcggataaaaaagcagttgca

SEQ ID NO: 4833 - DNA, 36 bp, Artificial Sequence
  Synthetic oligonucleotide
accgctgcacagcgaaaacgtacatgttatacataa

SEQ ID NO: 4834 - DNA, 37 bp, Artificial Sequence
  Synthetic oligonucleotide
gtggtgccgtctcacaccagtcatgtgactctctcga

SEQ ID NO: 4835 - DNA, 35 bp, Artificial Sequence
  Synthetic oligonucleotide
atcactgcgcaaccattatacgtgactggaagcct

SEQ ID NO: 4836 - DNA, 35 bp, Artificial Sequence
  Synthetic oligonucleotide
acacccgccgcatgcatactacggaatactgtaac

SEQ ID NO: 4837 - DNA, 37 bp, Artificial Sequence
  Synthetic oligonucleotide
gacgcgacgcagacttaagggtacggagtggaggtga

SEQ ID NO: 4838 - DNA, 35 bp, Artificial Sequence
  Synthetic oligonucleotide
gtagcccgaatgtacgttcaaccatcgcgtactcg

SEQ ID NO: 4839 - DNA, 35 bp, Artificial Sequence
  Synthetic oligonucleotide
gacaacggggcatgtaccgctaccaccttttccgc

SEQ ID NO: 4840 - DNA, 35 bp, Artificial Sequence
  Synthetic oligonucleotide
tcaacgccccgccactgcttgatgactgacagata

SEQ ID NO: 4841 - DNA, 35 bp, Artificial Sequence
  Synthetic oligonucleotide
gacacgacgatcagcaggacgtgaagagtacaatg

SEQ ID NO: 4842 - DNA, 37 bp, Artificial Sequence
  Synthetic oligonucleotide
tcgcgaggtgtgcggggtctgtacggggtcggatgga

SEQ ID NO: 4843 - DNA, 37 bp, Artificial Sequence
  Synthetic oligonucleotide
aacaccactcgtcccttaattcttcggacgtcctgga

SEQ ID NO: 4844 - DNA, 36 bp, Artificial Sequence
  Synthetic oligonucleotide
tgaacccgaggacaagctgaggagggaagaggacaa

SEQ ID NO: 4845 - DNA, 37 bp, Artificial Sequence
  Synthetic oligonucleotide
gacgaccgccagacgggatgaactcggttacatgcga

SEQ ID NO: 4846 - DNA, 35 bp, Artificial Sequence
  Synthetic oligonucleotide
atgcgccggacgtggatcaaggaatcatggcacaa

SEQ ID NO: 4847 - DNA, 36 bp, Artificial Sequence
  Synthetic oligonucleotide
ccggggaatggacaccccgaattgtcgaagattgga

SEQ ID NO: 4848 - DNA, 35 bp, Artificial Sequence
  Synthetic oligonucleotide
tcacatccgccttgccacacagtacacgtattcct

SEQ ID NO: 4849 - DNA, 37 bp, Artificial Sequence
  Synthetic oligonucleotide
tacgcgccggacatgccttcccaacccaccctaccga

SEQ ID NO: 4850 - DNA, 35 bp, Artificial Sequence
  Synthetic oligonucleotide
gccaacgttcaaatgactttcaccctggcctactc

SEQ ID NO: 4851 - DNA, 35 bp, Artificial Sequence
  Synthetic oligonucleotide
gctggcgaaagaccccctagacacagtcaacgcgc

SEQ ID NO: 4852 - DNA, 35 bp, Artificial Sequence
  Synthetic oligonucleotide
gtacgccgtcatctcaccatcatgcccaccaccaa

SEQ ID NO: 4853 - DNA, 35 bp, Artificial Sequence
  Synthetic oligonucleotide
tacccgcccaggaagaattttcacgttccgacgat

SEQ ID NO: 4854 - DNA, 37 bp, Artificial Sequence
  Synthetic oligonucleotide
acatgcccaaaaagggaaagcaaacattcgttcaaga

SEQ ID NO: 4855 - DNA, 36 bp, Artificial Sequence
  Synthetic oligonucleotide
taggtcgccccagccgaacaagcgtacaatcccaca

SEQ ID NO: 4856 - DNA, 35 bp, Artificial Sequence
  Synthetic oligonucleotide
tgcaacccactgtcgatgaggagagctgcttttgc

SEQ ID NO: 4857 - DNA, 35 bp, Artificial Sequence
  Synthetic oligonucleotide
acgcaccctcaaacacgctttcagcaccgcacgac

SEQ ID NO: 4858 - DNA, 36 bp, Artificial Sequence
  Synthetic oligonucleotide
acacgcacagggatgttggtggggtaaacgccgtta

SEQ ID NO: 4859 - DNA, 38 bp, Artificial Sequence
  Synthetic oligonucleotide
gaccagggcaactccatgaagtcccaacgccgtgttga

SEQ ID NO: 4860 - DNA, 35 bp, Artificial Sequence
  Synthetic oligonucleotide
gtgcacatgctacctagacgtttgtttaaccataa

SEQ ID NO: 4861 - DNA, 37 bp, Artificial Sequence
  Synthetic oligonucleotide
gaccgagtcgcagatggtaatttgacgtagccgcgga

SEQ ID NO: 4862 - DNA, 36 bp, Artificial Sequence
  Synthetic oligonucleotide
aagccaggtcgataggtatgtacagtcgggtgtcca

SEQ ID NO: 4863 - DNA, 37 bp, Artificial Sequence
  Synthetic oligonucleotide
gcaccattcccaaatgagtatgacgagcatatgtcga

SEQ ID NO: 4864 - DNA, 36 bp, Artificial Sequence
  Synthetic oligonucleotide
tgaccacgtgcgaagtacgtaaccaccctggcacaa

SEQ ID NO: 4865 - DNA, 37 bp, Artificial Sequence
  Synthetic oligonucleotide
aacgtgggcgggtgcggtatgacgtgggatcagccga

SEQ ID NO: 4866 - DNA, 35 bp, Artificial Sequence
  Synthetic oligonucleotide
tagtccaaacccccaatgcgaaggagcctgcccac

SEQ ID NO: 4867 - DNA, 37 bp, Artificial Sequence
  Synthetic oligonucleotide
tcaccccgcacctataattatgaccccgacctgccaa

SEQ ID NO: 4868 - DNA, 37 bp, Artificial Sequence
  Synthetic oligonucleotide
gacaccgcatgtgccacgatgcttcagtaagtttcga

SEQ ID NO: 4869 - DNA, 36 bp, Artificial Sequence
  Synthetic oligonucleotide
gacacccggccactggacgtatgccatgctctctaa

SEQ ID NO: 4870 - DNA, 35 bp, Artificial Sequence
  Synthetic oligonucleotide
gcccggaccacgttacagacccccagacgcgtgcg

SEQ ID NO: 4871 - DNA, 36 bp, Artificial Sequence
  Synthetic oligonucleotide
accacccatccgagcgaaacacgtatttcatgatca

SEQ ID NO: 4872 - DNA, 37 bp, Artificial Sequence
  Synthetic oligonucleotide
accagtcgaaagcgattcgatgttgggacataaatga

SEQ ID NO: 4873 - DNA, 35 bp, Artificial Sequence
  Synthetic oligonucleotide
acctgaccccgaatttacgccatagaacacctgtg

SEQ ID NO: 4874 - DNA, 38 bp, Artificial Sequence
  Synthetic oligonucleotide
actgcaacactgaccccgatgagacgataccgtggtga

SEQ ID NO: 4875 - DNA, 37 bp, Artificial Sequence
  Synthetic oligonucleotide
atcaccccagtgatgtcctctaggcaattacgctaga

SEQ ID NO: 4876 - DNA, 36 bp, Artificial Sequence
  Synthetic oligonucleotide
gcacgacgaacgcctgacacagttacactcgtcaaa

SEQ ID NO: 4877 - DNA, 38 bp, Artificial Sequence
  Synthetic oligonucleotide
gagatgtaagccaggcttccggcccgagagctaaatga

SEQ ID NO: 4878 - DNA, 37 bp, Artificial Sequence
  Synthetic oligonucleotide
taccacgcgggagacaggataagacggcatagtttga

SEQ ID NO: 4879 - DNA, 35 bp, Artificial Sequence
  Synthetic oligonucleotide
acactcaccccgtccaaccacaccccgtgactatt

SEQ ID NO: 4880 - DNA, 38 bp, Artificial Sequence
  Synthetic oligonucleotide
gaacggcacaacagtggtgttcacgtacgagatattga

SEQ ID NO: 4881 - DNA, 33 bp, Artificial Sequence
  Synthetic oligonucleotide
acacgtgcgcagaaagggacgtcgaatcaatga

SEQ ID NO: 4882 - DNA, 35 bp, Artificial Sequence
  Synthetic oligonucleotide
ccacaccaagcagtatcgctaggtacagtgaaatt

SEQ ID NO: 4883 - DNA, 36 bp, Artificial Sequence
  Synthetic oligonucleotide
tcacccgcatacaacggtactagaacaacctataca

SEQ ID NO: 4884 - DNA, 35 bp, Artificial Sequence
  Synthetic oligonucleotide
accgactccactatcgcctacagaccccgtgccgc

SEQ ID NO: 4885 - DNA, 36 bp, Artificial Sequence
  Synthetic oligonucleotide
gacgatcacacgtggacgtatagacgctcgttcgga

SEQ ID NO: 4886 - DNA, 35 bp, Artificial Sequence
  Synthetic oligonucleotide
acacgacggctgtatcctcacctccaccacctgta

SEQ ID NO: 4887 - DNA, 38 bp, Artificial Sequence
  Synthetic oligonucleotide
tgcgggggggggcgaagatgatgcaggggcgatcgtga

SEQ ID NO: 4888 - DNA, 36 bp, Artificial Sequence
  Synthetic oligonucleotide
gccgagcacgagtgcaacggaccagtaacttatcta

SEQ ID NO: 4889 - DNA, 38 bp, Artificial Sequence
  Synthetic oligonucleotide
tgactagcggcagtccctcaacatggccgtccctttaa

SEQ ID NO: 4890 - DNA, 35 bp, Artificial Sequence
  Synthetic oligonucleotide
atcaccgcacccatttccacggcctgcccacagcg

SEQ ID NO: 4891 - DNA, 37 bp, Artificial Sequence
  Synthetic oligonucleotide
tccaccccagggatcctcgttgctgtgcgcccacgga

SEQ ID NO: 4892 - DNA, 37 bp, Artificial Sequence
  Synthetic oligonucleotide
tgtcacaccccctgaccctgatccctgccattgacga

SEQ ID NO: 4893 - DNA, 37 bp, Artificial Sequence
  Synthetic oligonucleotide
tacaacgaccgccctaatccgatgacactgaagcaga

SEQ ID NO: 4894 - DNA, 36 bp, Artificial Sequence
  Synthetic oligonucleotide
tacaccctgcccactgaccccgaccacttgttgcga

SEQ ID NO: 4895 - DNA, 35 bp, Artificial Sequence
  Synthetic oligonucleotide
gacgacgggctgcaggctgtctcttgtccccgaaa

SEQ ID NO: 4896 - DNA, 37 bp, Artificial Sequence
  Synthetic oligonucleotide
gatgccaccgcccgcacaaaggactataagctaacga

SEQ ID NO: 4897 - DNA, 35 bp, Artificial Sequence
  Synthetic oligonucleotide
gcgaaggcccacctgacttacagattgttctttca

SEQ ID NO: 4898 - DNA, 36 bp, Artificial Sequence
  Synthetic oligonucleotide
tcagggctcccataggtgtcttcggtgcccgcttaa

SEQ ID NO: 4899 - DNA, 36 bp, Artificial Sequence
  Synthetic oligonucleotide
gagcacggagggtgacctagcgcacagtcaggataa

SEQ ID NO: 4900 - DNA, 35 bp, Artificial Sequence
  Synthetic oligonucleotide
ggaacgacacgatgcctcaatgttaagcagaatcc

SEQ ID NO: 4901 - DNA, 38 bp, Artificial Sequence
  Synthetic oligonucleotide
tgactcgggacagagtgatagagactcgcacatcctga

SEQ ID NO: 4902 - DNA, 35 bp, Artificial Sequence
  Synthetic oligonucleotide
gttggcgaaatgcttactgaccccgtaccctagac

SEQ ID NO: 4903 - DNA, 35 bp, Artificial Sequence
  Synthetic oligonucleotide
gacaagacacgatgagtgcaatcgaagtacaagta

SEQ ID NO: 4904 - DNA, 35 bp, Artificial Sequence
  Synthetic oligonucleotide
acacaacaacgggtcacagacacaagtcctctatg

SEQ ID NO: 4905 - DNA, 36 bp, Artificial Sequence
  Synthetic oligonucleotide
gatgccgtaacagctgtgttcatgcatgatattcga

SEQ ID NO: 4906 - DNA, 37 bp, Artificial Sequence
  Synthetic oligonucleotide
gccgaacccaccaccaatcaccagtcatttcaactga

SEQ ID NO: 4907 - DNA, 36 bp, Artificial Sequence
  Synthetic oligonucleotide
tgaccattgggcgtcgtcaccacttgggataataga

SEQ ID NO: 4908 - DNA, 35 bp, Artificial Sequence
  Synthetic oligonucleotide
atcctgcatgcgatgaacactgaccccgttaatac

SEQ ID NO: 4909 - DNA, 37 bp, Artificial Sequence
  Synthetic oligonucleotide
gcaaccacaagccaggactagcttttcacatatgtga

SEQ ID NO: 4910 - DNA, 35 bp, Artificial Sequence
  Synthetic oligonucleotide
gcacaggaggagtgtaaaattgtgctgtgtacctt

SEQ ID NO: 4911 - DNA, 36 bp, Artificial Sequence
  Synthetic oligonucleotide
gacaccaggtcacgctcaatatttagcacttcttta

SEQ ID NO: 4912 - DNA, 35 bp, Artificial Sequence
  Synthetic oligonucleotide
tgacaccacacccctctgtctatgtacttatgaca

SEQ ID NO: 4913 - DNA, 36 bp, Artificial Sequence
  Synthetic oligonucleotide
agacctgccacgctgcaacactcgcacttacaccga

SEQ ID NO: 4914 - DNA, 35 bp, Artificial Sequence
  Synthetic oligonucleotide
gacgaccgccagcctactctcttagaattcattcg

SEQ ID NO: 4915 - DNA, 36 bp, Artificial Sequence
  Synthetic oligonucleotide
tgcaccacccacacatgcctacgttagcccttagta

SEQ ID NO: 4916 - DNA, 38 bp, Artificial Sequence
  Synthetic oligonucleotide
gattcgccccaaccccgccgagaatcagaatggaatga

SEQ ID NO: 4917 - DNA, 38 bp, Artificial Sequence
  Synthetic oligonucleotide
gaggactgcagagggtaactggtaacgtgtcacgttga

SEQ ID NO: 4918 - DNA, 35 bp, Artificial Sequence
  Synthetic oligonucleotide
tacctcagccaggcgccaccaaaataagaatgcta

SEQ ID NO: 4919 - DNA, 38 bp, Artificial Sequence
  Synthetic oligonucleotide
tcagagcacaaggtacatgaggctggataacgggctga

SEQ ID NO: 4920 - DNA, 37 bp, Artificial Sequence
  Synthetic oligonucleotide
tgacaaccgcagtagagactgcaatgcagggcgacga

SEQ ID NO: 4921 - DNA, 35 bp, Artificial Sequence
  Synthetic oligonucleotide
aagacacactgaccccgccctggtgatattaaacc

SEQ ID NO: 4922 - DNA, 35 bp, Artificial Sequence
  Synthetic oligonucleotide
tatcccacggggggttacacctcttaataaccctc

SEQ ID NO: 4923 - DNA, 36 bp, Artificial Sequence
  Synthetic oligonucleotide
accacccccaggtcaccgttcgtaaaggttactcca

SEQ ID NO: 4924 - DNA, 37 bp, Artificial Sequence
  Synthetic oligonucleotide
taactgcgcagaaccgagcatcgccgcacaaatccga

SEQ ID NO: 4925 - DNA, 36 bp, Artificial Sequence
  Synthetic oligonucleotide
acccaactagcccaaaccactgagacattacgccaa

SEQ ID NO: 4926 - DNA, 37 bp, Artificial Sequence
  Synthetic oligonucleotide
atgcccgccggataaaaaacagaacagtgctgcttga

SEQ ID NO: 4927 - DNA, 35 bp, Artificial Sequence
  Synthetic oligonucleotide
tactgaccccgggcgaccatcccgttgttatatcc

SEQ ID NO: 4928 - DNA, 36 bp, Artificial Sequence
  Synthetic oligonucleotide
cggagtccgcacacgactgcatccgatcacttccta

SEQ ID NO: 4929 - DNA, 37 bp, Artificial Sequence
  Synthetic oligonucleotide
gcacctgcaacgctgaactgaccccgaatttacaaga

SEQ ID NO: 4930 - DNA, 35 bp, Artificial Sequence
  Synthetic oligonucleotide
tagtacgcagagggctaaggtacctatccgttatg

SEQ ID NO: 4931 - DNA, 35 bp, Artificial Sequence
  Synthetic oligonucleotide
aacacgggtgcagattcgacgacctaaacgctgtt

SEQ ID NO: 4932 - DNA, 35 bp, Artificial Sequence
  Synthetic oligonucleotide
taccgcggctggccgtgttacattgtactccgtgg

SEQ ID NO: 4933 - DNA, 38 bp, Artificial Sequence
  Synthetic oligonucleotide
tgacgggtgtagccagtgcggagactcgcacatactga

SEQ ID NO: 4934 - DNA, 38 bp, Artificial Sequence
  Synthetic oligonucleotide
ggagtgtaggcttccgcgaacggtatcgtagcaaatga

SEQ ID NO: 4935 - DNA, 35 bp, Artificial Sequence
  Synthetic oligonucleotide
gtgccaaaccggcacctgtattcttgctccccgtc

SEQ ID NO: 4936 - DNA, 36 bp, Artificial Sequence
  Synthetic oligonucleotide
gaccgcaaaggtaaatacaatggacatggcacccta

SEQ ID NO: 4937 - DNA, 36 bp, Artificial Sequence
  Synthetic oligonucleotide
tcgagggtgctaagacccccagacctcattactgca

SEQ ID NO: 4938 - DNA, 38 bp, Artificial Sequence
  Synthetic oligonucleotide
ggaacggaggtagtcctgtaaaagagcggacattgtga

SEQ ID NO: 4939 - DNA, 36 bp, Artificial Sequence
  Synthetic oligonucleotide
tagacgcgcgaggagcatcattgacctccaaagcga

SEQ ID NO: 4940 - DNA, 35 bp, Artificial Sequence
  Synthetic oligonucleotide
gatccacagccgtagtctcggtctcggtacaaatg

SEQ ID NO: 4941 - DNA, 38 bp, Artificial Sequence
  Synthetic oligonucleotide
acatcacgcccacggtgcaaccctcgtaacgattatga

SEQ ID NO: 4942 - DNA, 36 bp, Artificial Sequence
  Synthetic oligonucleotide
gatgcgagtgcaggtcttccgcccgatagattcttg

SEQ ID NO: 4943 - DNA, 38 bp, Artificial Sequence
  Synthetic oligonucleotide
gtgcaacatgcaaagtaacaccagacatcgacctatga

SEQ ID NO: 4944 - DNA, 34 bp, Artificial Sequence
  Synthetic oligonucleotide
gccctaaccccgccatgtccggaccccgtataac

SEQ ID NO: 4945 - DNA, 35 bp, Artificial Sequence
  Synthetic oligonucleotide
accacccggtgcattctcgtacggtcatccctcga

SEQ ID NO: 4946 - DNA, 36 bp, Artificial Sequence
  Synthetic oligonucleotide
ggtgcacgcccccaggtactcgtccttgctacgcta

SEQ ID NO: 4947 - DNA, 38 bp, Artificial Sequence
  Synthetic oligonucleotide
tacgccgtgagctcgttctaggacaggttcggttttga

SEQ ID NO: 4948 - DNA, 36 bp, Artificial Sequence
  Synthetic oligonucleotide
gacacaacaggatgtgctccggtaaccgttgcaata

SEQ ID NO: 4949 - DNA, 36 bp, Artificial Sequence
  Synthetic oligonucleotide
gtcaagcagaaccacaacgtattgaccgtgaccgta

SEQ ID NO: 4950 - DNA, 35 bp, Artificial Sequence
  Synthetic oligonucleotide
tgtgacgcaggagttataaaagtaatcgctcactt

SEQ ID NO: 4951 - DNA, 36 bp, Artificial Sequence
  Synthetic oligonucleotide
tgcacgagaggcatgcgaaagctgcgggacgtagca

SEQ ID NO: 4952 - DNA, 37 bp, Artificial Sequence
  Synthetic oligonucleotide
accccgggcgcagtatgttatgaatcccacgcttgga

SEQ ID NO: 4953 - DNA, 37 bp, Artificial Sequence
  Synthetic oligonucleotide
ccagggaggcagaatggcgccatcgatactcaaggga

SEQ ID NO: 4954 - DNA, 36 bp, Artificial Sequence
  Synthetic oligonucleotide
gacaacgaacctgtacaactcgcctcagaaaggcta

SEQ ID NO: 4955 - DNA, 38 bp, Artificial Sequence
  Synthetic oligonucleotide
aaccccagccgccaatcgataagccgccatcgttttga

SEQ ID NO: 4956 - DNA, 38 bp, Artificial Sequence
  Synthetic oligonucleotide
gccgtagctcggtaccgtgtgtcttcggtaataactga

SEQ ID NO: 4957 - DNA, 37 bp, Artificial Sequence
  Synthetic oligonucleotide
gcaccacacggcatttgagtaccgcttccgataatga

SEQ ID NO: 4958 - DNA, 35 bp, Artificial Sequence
  Synthetic oligonucleotide
gttgccaagcaacaacgtcactaatcttcgccctc

SEQ ID NO: 4959 - DNA, 36 bp, Artificial Sequence
  Synthetic oligonucleotide
accccaaccccgacatgcaagctgaccccttgacca

SEQ ID NO: 4960 - DNA, 35 bp, Artificial Sequence
  Synthetic oligonucleotide
gaccaccgcattagtgtcgaacatctacgggaaca

SEQ ID NO: 4961 - DNA, 36 bp, Artificial Sequence
  Synthetic oligonucleotide
aactggcctaatccactactgaccccgtgacatcca

SEQ ID NO: 4962 - DNA, 35 bp, Artificial Sequence
  Synthetic oligonucleotide
gccacccacgcgtaccttaagctagtctcatttta

SEQ ID NO: 4963 - DNA, 35 bp, Artificial Sequence
  Synthetic oligonucleotide
agctgcaacccaattcccccaattactgaccccga

SEQ ID NO: 4964 - DNA, 38 bp, Artificial Sequence
  Synthetic oligonucleotide
atcacgcgacgtgccctgctttacgtctttcactatga

SEQ ID NO: 4965 - DNA, 34 bp, Artificial Sequence
  Synthetic oligonucleotide
gccacgtaaacggccccaatactgaccccgcaaa

SEQ ID NO: 4966 - DNA, 37 bp, Artificial Sequence
  Synthetic oligonucleotide
tcacgacgcagtgatataggaagacttgaggcttgga

SEQ ID NO: 4967 - DNA, 35 bp, Artificial Sequence
  Synthetic oligonucleotide
tcgatactgaccccgcaactagctgctacatgccg

SEQ ID NO: 4968 - DNA, 38 bp, Artificial Sequence
  Synthetic oligonucleotide
acacacagaagtcactgctgcctccgttacccatttga

SEQ ID NO: 4969 - DNA, 36 bp, Artificial Sequence
  Synthetic oligonucleotide
gacaaccgccatgtctctggtaatcgttctggacca

SEQ ID NO: 4970 - DNA, 38 bp, Artificial Sequence
  Synthetic oligonucleotide
tgagccggcgccccttgctttatggtttgcgcggttga

SEQ ID NO: 4971 - DNA, 38 bp, Artificial Sequence
  Synthetic oligonucleotide
acagcacggagccaaaatgtacgcagacgctaacctga

SEQ ID NO: 4972 - DNA, 35 bp, Artificial Sequence
  Synthetic oligonucleotide
acccatcccaccccgcaccatcgcagtcaattgag

SEQ ID NO: 4973 - DNA, 37 bp, Artificial Sequence
  Synthetic oligonucleotide
tcaaaacaccgccgtccctccaataccgaccccgtga

SEQ ID NO: 4974 - DNA, 36 bp, Artificial Sequence
  Synthetic oligonucleotide
gcataccacacgcagatggtacctttctaatcttca

SEQ ID NO: 4975 - DNA, 35 bp, Artificial Sequence
  Synthetic oligonucleotide
accacccggacctgtttcttatgtgaggagctgag

SEQ ID NO: 4976 - DNA, 35 bp, Artificial Sequence
  Synthetic oligonucleotide
tgagctgagcggagcagacccccagacaggtcact

SEQ ID NO: 4977 - DNA, 37 bp, Artificial Sequence
  Synthetic oligonucleotide
gatccgtggcagattcagtaaaataggtacgtgacga

SEQ ID NO: 4978 - DNA, 35 bp, Artificial Sequence
  Synthetic oligonucleotide
gccctgccgccgactatctactgaccccgcaatgc

SEQ ID NO: 4979 - DNA, 37 bp, Artificial Sequence
  Synthetic oligonucleotide
ggatgcgccatggcaagagtcatcctctcgtatatga

SEQ ID NO: 4980 - DNA, 35 bp, Artificial Sequence
  Synthetic oligonucleotide
accccgaaaaaccagaccccgacctatgagatcca

SEQ ID NO: 4981 - DNA, 38 bp, Artificial Sequence
  Synthetic oligonucleotide
tatcatgccgcgaaccatccctgcctgtcaacatttga

SEQ ID NO: 4982 - DNA, 36 bp, Artificial Sequence
  Synthetic oligonucleotide
gacgaacacccggctatctcatgcaaccacacggaa

SEQ ID NO: 4983 - DNA, 38 bp, Artificial Sequence
  Synthetic oligonucleotide
gcctaggacacagaccccgccttatttacagtctttga

SEQ ID NO: 4984 - DNA, 35 bp, Artificial Sequence
  Synthetic oligonucleotide
tcatgcctcacagacgaccgtcgttcagggatcgt

SEQ ID NO: 4985 - DNA, 35 bp, Artificial Sequence
  Synthetic oligonucleotide
actgcctcccgtcgaagtataaagttagaccggca

SEQ ID NO: 4986 - DNA, 35 bp, Artificial Sequence
  Synthetic oligonucleotide
tcacacgcgagaggagcacctacaagaacgatgaa

SEQ ID NO: 4987 - DNA, 36 bp, Artificial Sequence
  Synthetic oligonucleotide
ctcgcatccgcatctccgtgatatgagaacagagta

SEQ ID NO: 4988 - DNA, 36 bp, Artificial Sequence
  Synthetic oligonucleotide
gcacgagcgaccgacagaaccccagacaagccatga

SEQ ID NO: 4989 - DNA, 36 bp, Artificial Sequence
  Synthetic oligonucleotide
gatgaccgcgtacatgtctgttatcgtttatcaaca

SEQ ID NO: 4990 - DNA, 36 bp, Artificial Sequence
  Synthetic oligonucleotide
aaacccaccagaaagacccccagactgtccgctgca

SEQ ID NO: 4991 - DNA, 35 bp, Artificial Sequence
  Synthetic oligonucleotide
gccaacggactgcatacccctctggccaaaccagt

SEQ ID NO: 4992 - DNA, 38 bp, Artificial Sequence
  Synthetic oligonucleotide
tgccaaacgcaggggtctggcgcaacaccttcaaatga

SEQ ID NO: 4993 - DNA, 37 bp, Artificial Sequence
  Synthetic oligonucleotide
cgtgcgtacggcgtgattggtggagcgcaggttccga

SEQ ID NO: 4994 - DNA, 38 bp, Artificial Sequence
  Synthetic oligonucleotide
gacacagaccccgcgattagtgagcaggtcctcaatga

SEQ ID NO: 4995 - DNA, 35 bp, Artificial Sequence
  Synthetic oligonucleotide
tactgcgcctcgcttggaatccactgaccccgaca

SEQ ID NO: 4996 - DNA, 35 bp, Artificial Sequence
  Synthetic oligonucleotide
gacaacagtcccaactctcacaggttgtctgtgta

SEQ ID NO: 4997 - DNA, 35 bp, Artificial Sequence
  Synthetic oligonucleotide
acactcgcccgtccagtatcgtcgatctggcatct

SEQ ID NO: 4998 - DNA, 37 bp, Artificial Sequence
  Synthetic oligonucleotide
accaaccacagaccccgtttatggtcctcggccaaga

SEQ ID NO: 4999 - DNA, 35 bp, Artificial Sequence
  Synthetic oligonucleotide
gcgaccaccccggatcgatgattccacctacttac

SEQ ID NO: 5000 - DNA, 36 bp, Artificial Sequence
  Synthetic oligonucleotide
tgaacccacgaccaatcctgaccccgattatgcctt

SEQ ID NO: 5001 - DNA, 34 bp, Artificial Sequence
  Synthetic oligonucleotide
acaacacccccagcaagtgtatccggactaagca

SEQ ID NO: 5002 - DNA, 37 bp, Artificial Sequence
  Synthetic oligonucleotide
accaacgcacagttccatctcaattactacatgttga

SEQ ID NO: 5003 - DNA, 37 bp, Artificial Sequence
  Synthetic oligonucleotide
atcgcaacgcgaccaatcactgtcacgtgagctctga

SEQ ID NO: 5004 - DNA, 36 bp, Artificial Sequence
  Synthetic oligonucleotide
gcacaagcaggtctgcagaaacagtatgacgcgtaa

SEQ ID NO: 5005 - DNA, 36 bp, Artificial Sequence
  Synthetic oligonucleotide
gcaccacgctccaaccccgaaaaggcatcgcgcgga

SEQ ID NO: 5006 - DNA, 37 bp, Artificial Sequence
  Synthetic oligonucleotide
accggactccactgagcagctagccactgaccccgga

SEQ ID NO: 5007 - DNA, 35 bp, Artificial Sequence
  Synthetic oligonucleotide
gacgcgcgcaaagcctttctctttctcctcgtacc

SEQ ID NO: 5008 - DNA, 35 bp, Artificial Sequence
  Synthetic oligonucleotide
ggccgaaggtcggggtttgaaaaagggcgcgagtg

SEQ ID NO: 5009 - DNA, 35 bp, Artificial Sequence
  Synthetic oligonucleotide
tacgagtgcagtgcatctatacttagccctaaacc

SEQ ID NO: 5010 - DNA, 35 bp, Artificial Sequence
  Synthetic oligonucleotide
tccacaatcggcattgacaacaaaaagtcggacat

SEQ ID NO: 5011 - DNA, 35 bp, Artificial Sequence
  Synthetic oligonucleotide
tgcgaaccatcgcacctcgactaagcgcttcatcc

SEQ ID NO: 5012 - DNA, 37 bp, Artificial Sequence
  Synthetic oligonucleotide
gtgggcaaccatcagacgctgcataggtacggtttga

SEQ ID NO: 5013 - DNA, 35 bp, Artificial Sequence
  Synthetic oligonucleotide
tacgccccaccaacactacccggatagacactgca

SEQ ID NO: 5014 - DNA, 36 bp, Artificial Sequence
  Synthetic oligonucleotide
gcctaccatcgcctttctgtattcgttcgaacgcta

SEQ ID NO: 5015 - DNA, 38 bp, Artificial Sequence
  Synthetic oligonucleotide
tcagtcgcagatgccacgagtacgcatattaacactga

SEQ ID NO: 5016 - DNA, 37 bp, Artificial Sequence
  Synthetic oligonucleotide
atcaccgctggaagtgggcgagagggacgaagtacga

SEQ ID NO: 5017 - DNA, 36 bp, Artificial Sequence
  Synthetic oligonucleotide
atgcacgaacagatgacaagcattagacaccctgaa

SEQ ID NO: 5018 - DNA, 36 bp, Artificial Sequence
  Synthetic oligonucleotide
gacatacgcagtaccaccgacatggatcgaaattat

SEQ ID NO: 5019 - DNA, 37 bp, Artificial Sequence
  Synthetic oligonucleotide
gcatccagccctccccagagttcaagcgagagttcga

SEQ ID NO: 5020 - DNA, 37 bp, Artificial Sequence
  Synthetic oligonucleotide
gggcgagagcccaacgtccaatttgacgtgagaaaga

SEQ ID NO: 5021 - DNA, 35 bp, Artificial Sequence
  Synthetic oligonucleotide
taacacccgcaaccagtacaatcttaagattacag

SEQ ID NO: 5022 - DNA, 36 bp, Artificial Sequence
  Synthetic oligonucleotide
gcatacgatgggccccagttcatcgcagtccccaga

SEQ ID NO: 5023 - DNA, 35 bp, Artificial Sequence
  Synthetic oligonucleotide
gtgcccacaactcccactccaccacaagtcggaga

SEQ ID NO: 5024 - DNA, 37 bp, Artificial Sequence
  Synthetic oligonucleotide
tacgccggattcccacacgaccatatgtcccaacatg

SEQ ID NO: 5025 - DNA, 37 bp, Artificial Sequence
  Synthetic oligonucleotide
gtgcgagagtgggtataagggcatcctcgcacacgga

SEQ ID NO: 5026 - DNA, 36 bp, Artificial Sequence
  Synthetic oligonucleotide
aacacccagtcgagcatgcacttcatggtcctatta

SEQ ID NO: 5027 - DNA, 35 bp, Artificial Sequence
  Synthetic oligonucleotide
tccgccggattcataacaggcgggtacaaaggcac

SEQ ID NO: 5028 - DNA, 37 bp, Artificial Sequence
  Synthetic oligonucleotide
gacaacccagtggcgttcgggaagtctgagacggtga

SEQ ID NO: 5029 - DNA, 37 bp, Artificial Sequence
  Synthetic oligonucleotide
tgcacactgaccccggcgaaatagatcgttttctgga

SEQ ID NO: 5030 - DNA, 37 bp, Artificial Sequence
  Synthetic oligonucleotide
gacgttcggcaggaaggacccccagaccgtcttagga

SEQ ID NO: 5031 - DNA, 37 bp, Artificial Sequence
  Synthetic oligonucleotide
tgccacctcaaagtgtagtctagtgcatcatggaaga

SEQ ID NO: 5032 - DNA, 35 bp, Artificial Sequence
  Synthetic oligonucleotide
tacacatcgggagatcggtagctcagcatgctccg

SEQ ID NO: 5033 - DNA, 35 bp, Artificial Sequence
  Synthetic oligonucleotide
acatgcgccgcggtatatgtgtgacatcaccgttg

SEQ ID NO: 5034 - DNA, 36 bp, Artificial Sequence
  Synthetic oligonucleotide
cgagaggagcgcgcaaggaggtacattcacttaata

SEQ ID NO: 5035 - DNA, 36 bp, Artificial Sequence
  Synthetic oligonucleotide
gcaacaccaaacgtaatgtggcactatcaccgctta

SEQ ID NO: 5036 - DNA, 35 bp, Artificial Sequence
  Synthetic oligonucleotide
gccatgcctcaacactgaccccgggattatttcat

SEQ ID NO: 5037 - DNA, 36 bp, Artificial Sequence
  Synthetic oligonucleotide
accaccgctagtgtcgggtaattcacgcccacgaga

SEQ ID NO: 5038 - DNA, 36 bp, Artificial Sequence
  Synthetic oligonucleotide
gctcacgaccacccggcgtattttagaaagaagtcg

SEQ ID NO: 5039 - DNA, 38 bp, Artificial Sequence
  Synthetic oligonucleotide
gtccctcggccatagtatacactgaccccgccctttga

SEQ ID NO: 5040 - DNA, 35 bp, Artificial Sequence
  Synthetic oligonucleotide
acaccggggcataacggcatgaataggttactaac

SEQ ID NO: 5041 - DNA, 36 bp, Artificial Sequence
  Synthetic oligonucleotide
tgccaacccaccagtctaatcagtagggagtggaaa

SEQ ID NO: 5042 - DNA, 35 bp, Artificial Sequence
  Synthetic oligonucleotide
gagtcgcatcgcctgccagatcagtcacctacaac

SEQ ID NO: 5043 - DNA, 37 bp, Artificial Sequence
  Synthetic oligonucleotide
cgacagaacgcactgtctgttctggcgacgggctgga

SEQ ID NO: 5044 - DNA, 38 bp, Artificial Sequence
  Synthetic oligonucleotide
gcgacacgacaatgctagtaaacccgctttctcaacga

SEQ ID NO: 5045 - DNA, 35 bp, Artificial Sequence
  Synthetic oligonucleotide
atgacatgccccacgtgttggcaaagttaggtctt

SEQ ID NO: 5046 - DNA, 35 bp, Artificial Sequence
  Synthetic oligonucleotide
tgtgcccgaagggtaacaacgtacattttggactc

SEQ ID NO: 5047 - DNA, 35 bp, Artificial Sequence
  Synthetic oligonucleotide
gatgccgccgacaggtgggtaatccgtctctttct

SEQ ID NO: 5048 - DNA, 34 bp, Artificial Sequence
  Synthetic oligonucleotide
tgatcaccagaccccgcaatgtatctggatctgt

SEQ ID NO: 5049 - DNA, 38 bp, Artificial Sequence
  Synthetic oligonucleotide
ccgccgggcctagtgagatggcggacgtgacaccctga

SEQ ID NO: 5050 - DNA, 37 bp, Artificial Sequence
  Synthetic oligonucleotide
tacacaccccgcccatgtacgagactagcggatggga

SEQ ID NO: 5051 - DNA, 36 bp, Artificial Sequence
  Synthetic oligonucleotide
tgacaacgaccgacaactttcactcaccgtaggcta

SEQ ID NO: 5052 - DNA, 35 bp, Artificial Sequence
  Synthetic oligonucleotide
actgcgccgaaccgccttttttacgtcagcagact

SEQ ID NO: 5053 - DNA, 36 bp, Artificial Sequence
  Synthetic oligonucleotide
gacgagcagtctgccgaggtggccaagagttgagaa

SEQ ID NO: 5054 - DNA, 36 bp, Artificial Sequence
  Synthetic oligonucleotide
gatgcgaatcacgacatcctaccgacacaccgatta

SEQ ID NO: 5055 - DNA, 35 bp, Artificial Sequence
  Synthetic oligonucleotide
gccacggagctatagagagaggttaacggtctttc

SEQ ID NO: 5056 - DNA, 37 bp, Artificial Sequence
  Synthetic oligonucleotide
tcacacaagcggtcatcgtattctgactactgttcga

SEQ ID NO: 5057 - DNA, 36 bp, Artificial Sequence
  Synthetic oligonucleotide
tgagacgcaagacgaatggatgacgtccgtgatcga

SEQ ID NO: 5058 - DNA, 38 bp, Artificial Sequence
  Synthetic oligonucleotide
gacgacaggtacgagcatgtctatacttcctgtaatga

SEQ ID NO: 5059 - DNA, 38 bp, Artificial Sequence
  Synthetic oligonucleotide
gccacaaggcgcgttaagttggttcgacacacgtttga

SEQ ID NO: 5060 - DNA, 37 bp, Artificial Sequence
  Synthetic oligonucleotide
gtgggtcgcggatcagacccccgagcacattatacga

SEQ ID NO: 5061 - DNA, 35 bp, Artificial Sequence
  Synthetic oligonucleotide
ccaacaccgtagtgaacatgtcgttaaggatgtgc

SEQ ID NO: 5062 - DNA, 35 bp, Artificial Sequence
  Synthetic oligonucleotide
gacacaccgctcctcttacccatcctggccatagc

SEQ ID NO: 5063 - DNA, 38 bp, Artificial Sequence
  Synthetic oligonucleotide
gacgacaaaaggcgtctaccgtcgatatgctaccttga

SEQ ID NO: 5064 - DNA, 37 bp, Artificial Sequence
  Synthetic oligonucleotide
atccacgcaaacccgcctcagatccgctttggaacga

SEQ ID NO: 5065 - DNA, 38 bp, Artificial Sequence
  Synthetic oligonucleotide
gatgggagggcgcgaatcgtattgagcaaaacaggtga

SEQ ID NO: 5066 - DNA, 36 bp, Artificial Sequence
  Synthetic oligonucleotide
tgagaccgcacccgactatccgtacagagactgtca

SEQ ID NO: 5067 - DNA, 35 bp, Artificial Sequence
  Synthetic oligonucleotide
gctcgtgccggtttgatgcgagccaagaccccagt

SEQ ID NO: 5068 - DNA, 35 bp, Artificial Sequence
  Synthetic oligonucleotide
tgtaacccggtgtcgattggattttgccctcttcc

SEQ ID NO: 5069 - DNA, 36 bp, Artificial Sequence
  Synthetic oligonucleotide
atctcaactgctgcctaagtcttccgtcccaacgaa

SEQ ID NO: 5070 - DNA, 35 bp, Artificial Sequence
  Synthetic oligonucleotide
gatgtcgatcgccgtacttgcatggagtgcttccc

SEQ ID NO: 5071 - DNA, 37 bp, Artificial Sequence
  Synthetic oligonucleotide
ggacgccatcacgtgtgaaaagagatgtgatcagcga

SEQ ID NO: 5072 - DNA, 35 bp, Artificial Sequence
  Synthetic oligonucleotide
actgaccccgaggtacgtatcggatgcatggcgca

SEQ ID NO: 5073 - DNA, 36 bp, Artificial Sequence
  Synthetic oligonucleotide
gacaccccggcctggatacttacttggtatatgcta

SEQ ID NO: 5074 - DNA, 38 bp, Artificial Sequence
  Synthetic oligonucleotide
cccgcaccgtcttcgcaggctgtgctccatgttcatga

SEQ ID NO: 5075 - DNA, 35 bp, Artificial Sequence
  Synthetic oligonucleotide
aagagcatccggccgtctactgaccccgcactatt

SEQ ID NO: 5076 - DNA, 36 bp, Artificial Sequence
  Synthetic oligonucleotide
tccgccgcattgtcctgaccccgcctatccaaacga

SEQ ID NO: 5077 - DNA, 35 bp, Artificial Sequence
  Synthetic oligonucleotide
gagaccgagacaaggatgataccgacgcgcagatt

SEQ ID NO: 5078 - DNA, 35 bp, Artificial Sequence
  Synthetic oligonucleotide
gcaacaccagcagttgcgcggcttaagcaagaatg

SEQ ID NO: 5079 - DNA, 37 bp, Artificial Sequence
  Synthetic oligonucleotide
gcaacgctatcagtagatgatatctgcgttcccggga

SEQ ID NO: 5080 - DNA, 35 bp, Artificial Sequence
  Synthetic oligonucleotide
gcctcaggcccttttattgccctgctaccgaatcc

SEQ ID NO: 5081 - DNA, 35 bp, Artificial Sequence
  Synthetic oligonucleotide
gtgcgaacgtgctggagttgaagggtacacccact

SEQ ID NO: 5082 - DNA, 38 bp, Artificial Sequence
  Synthetic oligonucleotide
taactgaccccgggctagtctgtaaggactcaggttga

SEQ ID NO: 5083 - DNA, 35 bp, Artificial Sequence
  Synthetic oligonucleotide
tcacgagccgtcagggtgccaccgaaaccctctgc

SEQ ID NO: 5084 - DNA, 37 bp, Artificial Sequence
  Synthetic oligonucleotide
tgagacgcaggacgctaaactcgatgatcagatttga

SEQ ID NO: 5085 - DNA, 35 bp, Artificial Sequence
  Synthetic oligonucleotide
atcaccacacaaccatggaggctgttcagctgggg

SEQ ID NO: 5086 - DNA, 36 bp, Artificial Sequence
  Synthetic oligonucleotide
gcaaccgccggacgtgtgatggggtacgtgcgctta

SEQ ID NO: 5087 - DNA, 36 bp, Artificial Sequence
  Synthetic oligonucleotide
tcacatcgcccagggtgttcaatgccaattgactaa

SEQ ID NO: 5088 - DNA, 37 bp, Artificial Sequence
  Synthetic oligonucleotide
tcagcagtcgacacgttccctttcatccagtcggaga

SEQ ID NO: 5089 - DNA, 36 bp, Artificial Sequence
  Synthetic oligonucleotide
gagcaccacggactgctgctttaggatgagacggta

SEQ ID NO: 5090 - DNA, 36 bp, Artificial Sequence
  Synthetic oligonucleotide
gccgaacgaaggagcacgagcatgtattccgcgcaa

SEQ ID NO: 5091 - DNA, 38 bp, Artificial Sequence
  Synthetic oligonucleotide
acacgacgaaggaatacagtgcgattttgaggaagtga

SEQ ID NO: 5092 - DNA, 35 bp, Artificial Sequence
  Synthetic oligonucleotide
gccatcccaatggctactatcgagtgaacgctgct

SEQ ID NO: 5093 - DNA, 38 bp, Artificial Sequence
  Synthetic oligonucleotide
accacacgcacgctaacggagatttcgcacaaatctga

SEQ ID NO: 5094 - DNA, 35 bp, Artificial Sequence
  Synthetic oligonucleotide
ccggggatgaccattgctcgtctgaaggatgtttt

SEQ ID NO: 5095 - DNA, 37 bp, Artificial Sequence
  Synthetic oligonucleotide
atgcaaaccgctgaccgataaaacaaccttaccacga

SEQ ID NO: 5096 - DNA, 37 bp, Artificial Sequence
  Synthetic oligonucleotide
cagagccatcgagcatcgttcgaacacagagttagga

SEQ ID NO: 5097 - DNA, 35 bp, Artificial Sequence
  Synthetic oligonucleotide
ggacacatccgaagcacagaaggcggtctggctga

SEQ ID NO: 5098 - DNA, 38 bp, Artificial Sequence
  Synthetic oligonucleotide
tcagccgggtgcaacagacctacaacagcaatggttga

SEQ ID NO: 5099 - DNA, 35 bp, Artificial Sequence
  Synthetic oligonucleotide
gaacgcctcacacgccaacatacattgtatcctca

SEQ ID NO: 5100 - DNA, 36 bp, Artificial Sequence
  Synthetic oligonucleotide
gttgacccgctgcagttgtgcttagatctaactgta

SEQ ID NO: 5101 - DNA, 35 bp, Artificial Sequence
  Synthetic oligonucleotide
ttaccggcacacccaaccccgtcttattcgcaacc

SEQ ID NO: 5102 - DNA, 35 bp, Artificial Sequence
  Synthetic oligonucleotide
gcacatcagcccatacctaccttttcatgatggcc

SEQ ID NO: 5103 - DNA, 36 bp, Artificial Sequence
  Synthetic oligonucleotide
gccgaaacgaggataaggacacatctcctaatcaaa

SEQ ID NO: 5104 - DNA, 38 bp, Artificial Sequence
  Synthetic oligonucleotide
gtgaccgcatcggtgaggtactaagcattcgcctctga

SEQ ID NO: 5105 - DNA, 36 bp, Artificial Sequence
  Synthetic oligonucleotide
gctacgccgctgctgcttactgaccccgatttacta

SEQ ID NO: 5106 - DNA, 38 bp, Artificial Sequence
  Synthetic oligonucleotide
tagtcacgacggagcatggaagagaagaattggagtga

SEQ ID NO: 5107 - DNA, 37 bp, Artificial Sequence
  Synthetic oligonucleotide
gacgcaggcacgtaacggaaattgtagatgacttcga

SEQ ID NO: 5108 - DNA, 35 bp, Artificial Sequence
  Synthetic oligonucleotide
gcaacactgcgccacacgaccctcgccttctctcg

SEQ ID NO: 5109 - DNA, 35 bp, Artificial Sequence
  Synthetic oligonucleotide
gcacagccgccccgagacaagcaggctccatatgg

SEQ ID NO: 5110 - DNA, 35 bp, Artificial Sequence
  Synthetic oligonucleotide
gtgagcacagcagtatgcgatctatcaacaacacc

SEQ ID NO: 5111 - DNA, 37 bp, Artificial Sequence
  Synthetic oligonucleotide
tacatgccacagcctcacacacccacgtataaaccga

SEQ ID NO: 5112 - DNA, 36 bp, Artificial Sequence
  Synthetic oligonucleotide
atgccacaggacgtatctgcgaacagggtacttata

SEQ ID NO: 5113 - DNA, 35 bp, Artificial Sequence
  Synthetic oligonucleotide
gacgcagtcacgtggaccaaagagtgctagacctt

SEQ ID NO: 5114 - DNA, 35 bp, Artificial Sequence
  Synthetic oligonucleotide
tcacacaacacgcctgatattctgtgcagatctag

SEQ ID NO: 5115 - DNA, 35 bp, Artificial Sequence
  Synthetic oligonucleotide
acaactcgcgcaaacacctcgttgccaggaagaag

SEQ ID NO: 5116 - DNA, 38 bp, Artificial Sequence
  Synthetic oligonucleotide
gcacacgtacgcacaggttcgccaaggtggacctatga

SEQ ID NO: 5117 - DNA, 36 bp, Artificial Sequence
  Synthetic oligonucleotide
tgaaccgccgcccaccgtggatccactgccgacata

SEQ ID NO: 5118 - DNA, 35 bp, Artificial Sequence
  Synthetic oligonucleotide
gaatcacgccgagtattcgttcccacaagcccgcc

SEQ ID NO: 5119 - DNA, 37 bp, Artificial Sequence
  Synthetic oligonucleotide
aacgccacgagaatgcaggagaagagggcccatctga

SEQ ID NO: 5120 - DNA, 36 bp, Artificial Sequence
  Synthetic oligonucleotide
gacgacacacgcttagagatttcgttgagaccgaga

SEQ ID NO: 5121 - DNA, 35 bp, Artificial Sequence
  Synthetic oligonucleotide
gtgacgccccagtgtcaccaaatgccaccctatct

SEQ ID NO: 5122 - DNA, 35 bp, Artificial Sequence
  Synthetic oligonucleotide
ggtgccgaaccatccacagtatatcaacgttttca

SEQ ID NO: 5123 - DNA, 34 bp, Artificial Sequence
  Synthetic oligonucleotide
tcatcaccccatccgtcgaaagtggctctcgttc

SEQ ID NO: 5124 - DNA, 36 bp, Artificial Sequence
  Synthetic oligonucleotide
tagtacgcccgttccgaagagcactctatcactaca

SEQ ID NO: 5125 - DNA, 37 bp, Artificial Sequence
  Synthetic oligonucleotide
gactcgcacaacagatacagccagtcttaggggtaga

SEQ ID NO: 5126 - DNA, 37 bp, Artificial Sequence
  Synthetic oligonucleotide
gcaaccgggcgtggagcagggatgggggacatggtga

SEQ ID NO: 5127 - DNA, 36 bp, Artificial Sequence
  Synthetic oligonucleotide
gcacgccttagctgcttacccatactgaccccgcaa

SEQ ID NO: 5128 - DNA, 35 bp, Artificial Sequence
  Synthetic oligonucleotide
atgcccccgtcaagccgttgctaccatccatattt

SEQ ID NO: 5129 - DNA, 35 bp, Artificial Sequence
  Synthetic oligonucleotide
gacgcggtagcactgtaaacggggttcgttctcct

SEQ ID NO: 5130 - DNA, 35 bp, Artificial Sequence
  Synthetic oligonucleotide
acacacgcacagtatggaaatagggacgtaagctg

SEQ ID NO: 5131 - DNA, 38 bp, Artificial Sequence
  Synthetic oligonucleotide
gatgcctcgatgtgaccagatcagtaaatgcactatga

SEQ ID NO: 5132 - DNA, 35 bp, Artificial Sequence
  Synthetic oligonucleotide
gattcgcttccggattttatggccaaatgcgaggg

SEQ ID NO: 5133 - DNA, 35 bp, Artificial Sequence
  Synthetic oligonucleotide
gcgcaagcacggccttgtgtctaaagcactgttcg

SEQ ID NO: 5134 - DNA, 37 bp, Artificial Sequence
  Synthetic oligonucleotide
tactgaccccgaccacgggcctactgactacagtgga

SEQ ID NO: 5135 - DNA, 36 bp, Artificial Sequence
  Synthetic oligonucleotide
accacggtgcacggtatgctcaacatcatggtgaca

SEQ ID NO: 5136 - DNA, 38 bp, Artificial Sequence
  Synthetic oligonucleotide
gcgagagcacggaaggcattgggatgtgggaagattga

SEQ ID NO: 5137 - DNA, 36 bp, Artificial Sequence
  Synthetic oligonucleotide
gttggtgtagcgcagaccccaacagaggatgatcga

SEQ ID NO: 5138 - DNA, 38 bp, Artificial Sequence
  Synthetic oligonucleotide
gccggacgagggacgtgtgagtcgcaggtgagaattga

SEQ ID NO: 5139 - DNA, 36 bp, Artificial Sequence
  Synthetic oligonucleotide
gcgaagcacggccagatacctgcacatgttgaccaa

SEQ ID NO: 5140 - DNA, 37 bp, Artificial Sequence
  Synthetic oligonucleotide
tcggggacggacgccatgatcgacttttagaggacga

SEQ ID NO: 5141 - DNA, 36 bp, Artificial Sequence
  Synthetic oligonucleotide
acatgcccctgttctggtatactctccgttgtctca

SEQ ID NO: 5142 - DNA, 36 bp, Artificial Sequence
  Synthetic oligonucleotide
gggaacgccgtgcatgcgtagccattgtgtcgtcca

SEQ ID NO: 5143 - DNA, 36 bp, Artificial Sequence
  Synthetic oligonucleotide
gtgggccacagtcagctctatcaatcgaatcttaca

SEQ ID NO: 5144 - DNA, 37 bp, Artificial Sequence
  Synthetic oligonucleotide
gccaaccctcaacatgttcacttacttcctaatggga

SEQ ID NO: 5145 - DNA, 38 bp, Artificial Sequence
  Synthetic oligonucleotide
gatgcaccgcctcagctcgagcatataccatgcggtga

SEQ ID NO: 5146 - DNA, 38 bp, Artificial Sequence
  Synthetic oligonucleotide
acaacgcatccgtgcaggtgctgtgcggacacaagtga

SEQ ID NO: 5147 - DNA, 38 bp, Artificial Sequence
  Synthetic oligonucleotide
gccgaaggtgcggaagagatgtattctcgaacgactga

SEQ ID NO: 5148 - DNA, 36 bp, Artificial Sequence
  Synthetic oligonucleotide
acatgcaacgccatcagtagcattgaaaggtggtca

SEQ ID NO: 5149 - DNA, 36 bp, Artificial Sequence
  Synthetic oligonucleotide
gccaacagggcggtaacacccagtatgtaccgtcta

SEQ ID NO: 5150 - DNA, 36 bp, Artificial Sequence
  Synthetic oligonucleotide
gtcgtcgcataagacatgtgcagttagggtgtccaa

SEQ ID NO: 5151 - DNA, 36 bp, Artificial Sequence
  Synthetic oligonucleotide
tgacgctcccgaatcacggaaccacctcgtagtaaa

SEQ ID NO: 5152 - DNA, 38 bp, Artificial Sequence
  Synthetic oligonucleotide
gcccacgcatggtagacgtacgtactagtatctcctga

SEQ ID NO: 5153 - DNA, 36 bp, Artificial Sequence
  Synthetic oligonucleotide
ctgcacgtgagcccgataggtgtgtggtccaaagta

SEQ ID NO: 5154 - DNA, 37 bp, Artificial Sequence
  Synthetic oligonucleotide
gcagaccactgaccccgaatcataaagctggatttga

SEQ ID NO: 5155 - DNA, 37 bp, Artificial Sequence
  Synthetic oligonucleotide
accatcgcaagtgcccgcggaagtctattttttttga

SEQ ID NO: 5156 - DNA, 38 bp, Artificial Sequence
  Synthetic oligonucleotide
gccacaatcagcaaaataagatcgtctctagagcgtga

SEQ ID NO: 5157 - DNA, 36 bp, Artificial Sequence
  Synthetic oligonucleotide
tagcgcccagaccccctgacattccaccgaagtgca

SEQ ID NO: 5158 - DNA, 38 bp, Artificial Sequence
  Synthetic oligonucleotide
tcaacatcccaatgtttacggaagcacacgaatcgtga

SEQ ID NO: 5159 - DNA, 38 bp, Artificial Sequence
  Synthetic oligonucleotide
tgacgactccgacagccatggcaagaggcaacgtgtga

SEQ ID NO: 5160 - DNA, 36 bp, Artificial Sequence
  Synthetic oligonucleotide
accaacgcagactccccacccacacactgagacgca

SEQ ID NO: 5161 - DNA, 36 bp, Artificial Sequence
  Synthetic oligonucleotide
acccttacgccggacggttgcaaggacccccagaaa

SEQ ID NO: 5162 - DNA, 38 bp, Artificial Sequence
  Synthetic oligonucleotide
gcacatctcgcagacgagtatagaccaacactgattga

SEQ ID NO: 5163 - DNA, 35 bp, Artificial Sequence
  Synthetic oligonucleotide
gacgccacagtcaaacctcgggggcatataccacg

SEQ ID NO: 5164 - DNA, 35 bp, Artificial Sequence
  Synthetic oligonucleotide
tacgagcccaatgtcgttgtttgcaggcccgttcg

SEQ ID NO: 5165 - DNA, 36 bp, Artificial Sequence
  Synthetic oligonucleotide
atgtcacgccacaggaaattaaagcaattgggcgga

SEQ ID NO: 5166 - DNA, 35 bp, Artificial Sequence
  Synthetic oligonucleotide
gagcacgcttggtcagtcatgtgtcagaccttcac

SEQ ID NO: 5167 - DNA, 35 bp, Artificial Sequence
  Synthetic oligonucleotide
gatgcacacgtcaacacgcagagaccagaaggaag

SEQ ID NO: 5168 - DNA, 35 bp, Artificial Sequence
  Synthetic oligonucleotide
gctgcaacccattgcaccgtgactcccaaggcagc

SEQ ID NO: 5169 - DNA, 37 bp, Artificial Sequence
  Synthetic oligonucleotide
gtgccacggagtccagggtaggccaccaacttgcaga

SEQ ID NO: 5170 - DNA, 36 bp, Artificial Sequence
  Synthetic oligonucleotide
aacaccgcaactgcagcaatgcgaaaatgatcttca

SEQ ID NO: 5171 - DNA, 36 bp, Artificial Sequence
  Synthetic oligonucleotide
accaacccaaccccgctcacttctcttgagacagca

SEQ ID NO: 5172 - DNA, 35 bp, Artificial Sequence
  Synthetic oligonucleotide
gcacaggtaatgtagcctgacatccctaatgctcc

SEQ ID NO: 5173 - DNA, 37 bp, Artificial Sequence
  Synthetic oligonucleotide
gcaggcccgtggggtcttcgggtgtccaagactccga

SEQ ID NO: 5174 - DNA, 36 bp, Artificial Sequence
  Synthetic oligonucleotide
aatgccacacacctgcgtactgggacgctgtatcta

SEQ ID NO: 5175 - DNA, 37 bp, Artificial Sequence
  Synthetic oligonucleotide
acaaccggggtgaaggttgtacgtcacgctgttttga

SEQ ID NO: 5176 - DNA, 35 bp, Artificial Sequence
  Synthetic oligonucleotide
acgaccggatgtgttgaactgggcgtgagagttcc

SEQ ID NO: 5177 - DNA, 38 bp, Artificial Sequence
  Synthetic oligonucleotide
tagcaaccacatcgtcaaacataagcaacacatgttga

SEQ ID NO: 5178 - DNA, 35 bp, Artificial Sequence
  Synthetic oligonucleotide
agcacagcccagtccgacatggtccctgtggatcg

SEQ ID NO: 5179 - DNA, 38 bp, Artificial Sequence
  Synthetic oligonucleotide
atcgccgaggaagtgtggtgtgggattgataagactga

SEQ ID NO: 5180 - DNA, 37 bp, Artificial Sequence
  Synthetic oligonucleotide
tgcactgaccccgcaccttacgttaacgacgccccca

SEQ ID NO: 5181 - DNA, 35 bp, Artificial Sequence
  Synthetic oligonucleotide
agcccaaccccgaatagcacacaactgggaggacc

SEQ ID NO: 5182 - DNA, 36 bp, Artificial Sequence
  Synthetic oligonucleotide
gaccagtgtgcggagaggagcgtagagacgcggtga

SEQ ID NO: 5183 - DNA, 38 bp, Artificial Sequence
  Synthetic oligonucleotide
gacgcccagcaagtgaatatgagattaatagtcgatga

SEQ ID NO: 5184 - DNA, 35 bp, Artificial Sequence
  Synthetic oligonucleotide
gatgcgccacaatttaggtttatttcagctcggca

SEQ ID NO: 5185 - DNA, 35 bp, Artificial Sequence
  Synthetic oligonucleotide
gcacatgcctcaaagcttctgatacgcgtttcgta

SEQ ID NO: 5186 - DNA, 36 bp, Artificial Sequence
  Synthetic oligonucleotide
tacatcagctgccgtactgttctagtcatgttctta

SEQ ID NO: 5187 - DNA, 36 bp, Artificial Sequence
  Synthetic oligonucleotide
atgcacccacatcatggtgacagaataagcggcaca

SEQ ID NO: 5188 - DNA, 36 bp, Artificial Sequence
  Synthetic oligonucleotide
ggaccactttctgaccccgcattcgaccattctata

SEQ ID NO: 5189 - DNA, 35 bp, Artificial Sequence
  Synthetic oligonucleotide
gatgccggtactagtctcctagtgatcctcacatg

SEQ ID NO: 5190 - DNA, 35 bp, Artificial Sequence
  Synthetic oligonucleotide
gtgcggtacgtaagcctgcataagtttgtagcacc

SEQ ID NO: 5191 - DNA, 35 bp, Artificial Sequence
  Synthetic oligonucleotide
gtttcaaccactgaccccgctcaactcaacagacc

SEQ ID NO: 5192 - DNA, 35 bp, Artificial Sequence
  Synthetic oligonucleotide
gacacgcagaggggactcaacagtaataagcttgg

SEQ ID NO: 5193 - DNA, 35 bp, Artificial Sequence
  Synthetic oligonucleotide
gccagtccgaaccccagccggtggatcccaagcca

SEQ ID NO: 5194 - DNA, 35 bp, Artificial Sequence
  Synthetic oligonucleotide
gcgcgaagcatcctcccaccctacttttaagactc

SEQ ID NO: 5195 - DNA, 37 bp, Artificial Sequence
  Synthetic oligonucleotide
aacaccaccaagcctaggtgcgttaaatacttcgaga

SEQ ID NO: 5196 - DNA, 35 bp, Artificial Sequence
  Synthetic oligonucleotide
gcctgacaggcgtgcaaactggtaatgatggataa

SEQ ID NO: 5197 - DNA, 38 bp, Artificial Sequence
  Synthetic oligonucleotide
gtgacagaagccgctgcacaattcggtagactgaatga

SEQ ID NO: 5198 - DNA, 35 bp, Artificial Sequence
  Synthetic oligonucleotide
tcacgcccgtctcccaatttgtcgtctactcctag

SEQ ID NO: 5199 - DNA, 37 bp, Artificial Sequence
  Synthetic oligonucleotide
gccgacacaccagagaagcagtattgacgtgagcgga

SEQ ID NO: 5200 - DNA, 38 bp, Artificial Sequence
  Synthetic oligonucleotide
acaccagaacgggtgcatctctggacccataaatgtga

SEQ ID NO: 5201 - DNA, 38 bp, Artificial Sequence
  Synthetic oligonucleotide
gatgcgaaagtcgagcgtaaggcattacacgtggatga

SEQ ID NO: 5202 - DNA, 36 bp, Artificial Sequence
  Synthetic oligonucleotide
gcccgacgcagggatacgctagacctgttataccga

SEQ ID NO: 5203 - DNA, 38 bp, Artificial Sequence
  Synthetic oligonucleotide
atgtgctgctgaaggtcggaacagtgcgtgggttatga

SEQ ID NO: 5204 - DNA, 35 bp, Artificial Sequence
  Synthetic oligonucleotide
gcatcgcaacccgaacggcattgagcaaacgcgag

SEQ ID NO: 5205 - DNA, 35 bp, Artificial Sequence
  Synthetic oligonucleotide
gtccacccatctccgtttagtcgtcaagcattacg

SEQ ID NO: 5206 - DNA, 35 bp, Artificial Sequence
  Synthetic oligonucleotide
tgtggaggctacgtctagggtagagacgaagcaac

SEQ ID NO: 5207 - DNA, 36 bp, Artificial Sequence
  Synthetic oligonucleotide
ctcgacgcgggccaaggatagcgtattcgtgatgga

SEQ ID NO: 5208 - DNA, 35 bp, Artificial Sequence
  Synthetic oligonucleotide
gcatccgtgcagaccccctagtcgtatctttggaa

SEQ ID NO: 5209 - DNA, 38 bp, Artificial Sequence
  Synthetic oligonucleotide
tgcgaccccgcacctaccccgccacgactggcccttga

SEQ ID NO: 5210 - DNA, 35 bp, Artificial Sequence
  Synthetic oligonucleotide
acgaacggtagagagtacgtgtacgcaaaggatag

SEQ ID NO: 5211 - DNA, 38 bp, Artificial Sequence
  Synthetic oligonucleotide
gcgacggtaagatgatgaaaggtaaggtcagagggtga

SEQ ID NO: 5212 - DNA, 38 bp, Artificial Sequence
  Synthetic oligonucleotide
aatggtggaggcgggggggaggacggtgagcttagtga

SEQ ID NO: 5213 - DNA, 35 bp, Artificial Sequence
  Synthetic oligonucleotide
atcactcctacgcactgagaccccgtaacctgacc

SEQ ID NO: 5214 - DNA, 38 bp, Artificial Sequence
  Synthetic oligonucleotide
tcaccgtcccaacgtgctgcgaccctgtctttctctga

SEQ ID NO: 5215 - DNA, 38 bp, Artificial Sequence
  Synthetic oligonucleotide
acccgacccgcctactgaagcatcatgtctccgactga

SEQ ID NO: 5216 - DNA, 35 bp, Artificial Sequence
  Synthetic oligonucleotide
acgcaccatgccggaacattatctctcgctacatt

SEQ ID NO: 5217 - DNA, 38 bp, Artificial Sequence
  Synthetic oligonucleotide
tccaacgtccgcagaactgtacgctaagggaagtttga

SEQ ID NO: 5218 - DNA, 35 bp, Artificial Sequence
  Synthetic oligonucleotide
gagtgcgtacggtccgtctcgcctttttttgtctc

SEQ ID NO: 5219 - DNA, 35 bp, Artificial Sequence
  Synthetic oligonucleotide
gcacaggcagaaccggtacaccgccaaatacgttt

SEQ ID NO: 5220 - DNA, 36 bp, Artificial Sequence
  Synthetic oligonucleotide
gctaggtccgcccttaagattcgatgatagtcccaa

SEQ ID NO: 5221 - DNA, 36 bp, Artificial Sequence
  Synthetic oligonucleotide
gagccgtcaaaggcacatgtcagacccccagaccca

SEQ ID NO: 5222 - DNA, 35 bp, Artificial Sequence
  Synthetic oligonucleotide
accggggaaggtacggtgtcggtcatgaacactac

SEQ ID NO: 5223 - DNA, 37 bp, Artificial Sequence
  Synthetic oligonucleotide
gccattgccgccttacactacatcgcgatatacgtga

SEQ ID NO: 5224 - DNA, 35 bp, Artificial Sequence
  Synthetic oligonucleotide
accaccagcctcgcgcggcacccaccacggtccca

SEQ ID NO: 5225 - DNA, 37 bp, Artificial Sequence
  Synthetic oligonucleotide
gacgcaaccacttacatggtgccagtgcttttccgga

SEQ ID NO: 5226 - DNA, 35 bp, Artificial Sequence
  Synthetic oligonucleotide
gatgccagacgtcctcattgatttcgagatgagag

SEQ ID NO: 5227 - DNA, 38 bp, Artificial Sequence
  Synthetic oligonucleotide
gatgccccgcttagtcaggcaaccgcagtatagactga

SEQ ID NO: 5228 - DNA, 37 bp, Artificial Sequence
  Synthetic oligonucleotide
tgacaccaagcatcgtgatgacttactcaccatttga

SEQ ID NO: 5229 - DNA, 32 bp, Artificial Sequence
  Synthetic oligonucleotide
gcaacgctgatgagttgcacgtgtaatgggat

SEQ ID NO: 5230 - DNA, 35 bp, Artificial Sequence
  Synthetic oligonucleotide
acacacacacaccccatgtccgcttttagctgtta

SEQ ID NO: 5231 - DNA, 36 bp, Artificial Sequence
  Synthetic oligonucleotide
cgcaccccgtaagtgagaagttatgcgctctgccaa

SEQ ID NO: 5232 - DNA, 38 bp, Artificial Sequence
  Synthetic oligonucleotide
tacaacgcaggggtcagaatattcggcaaagactgtga

SEQ ID NO: 5233 - DNA, 37 bp, Artificial Sequence
  Synthetic oligonucleotide
taccacgccacgggacctaaacgcagcactgatagga

SEQ ID NO: 5234 - DNA, 35 bp, Artificial Sequence
  Synthetic oligonucleotide
acgtgccgacagaccccccagcttttcaattcgcg

SEQ ID NO: 5235 - DNA, 35 bp, Artificial Sequence
  Synthetic oligonucleotide
gaatacgcacgtggccataaaccgcatcttccgcc

SEQ ID NO: 5236 - DNA, 35 bp, Artificial Sequence
  Synthetic oligonucleotide
atcgcgaacaacctgcaagaaggcgtactccctac

SEQ ID NO: 5237 - DNA, 35 bp, Artificial Sequence
  Synthetic oligonucleotide
tgagccatcgggcgttcgagttgcctgtcaatgtt

SEQ ID NO: 5238 - DNA, 38 bp, Artificial Sequence
  Synthetic oligonucleotide
gaacccgccaaacagtgtttacggaaggcggtgcttga

SEQ ID NO: 5239 - DNA, 36 bp, Artificial Sequence
  Synthetic oligonucleotide
acatgtccgcatcactcgtcgacataagcagttgaa

SEQ ID NO: 5240 - DNA, 35 bp, Artificial Sequence
  Synthetic oligonucleotide
gcaccgaagcaagtgacccagcctgactatggaat

SEQ ID NO: 5241 - DNA, 35 bp, Artificial Sequence
  Synthetic oligonucleotide
gagccatgccctattcaactgaccccgaacactat

SEQ ID NO: 5242 - DNA, 35 bp, Artificial Sequence
  Synthetic oligonucleotide
gcaaaccccaggaggaggacacctgtattatgtcg

SEQ ID NO: 5243 - DNA, 36 bp, Artificial Sequence
  Synthetic oligonucleotide
gtgccggagcactcgttatgaaagttgtgacatgca

SEQ ID NO: 5244 - DNA, 35 bp, Artificial Sequence
  Synthetic oligonucleotide
acacacccattgaaatgtccgttcgctctacgaga

SEQ ID NO: 5245 - DNA, 37 bp, Artificial Sequence
  Synthetic oligonucleotide
gaccccgacaacacgcaatactcaaccccgcaaagga

SEQ ID NO: 5246 - DNA, 35 bp, Artificial Sequence
  Synthetic oligonucleotide
tcacacgcacgggcgtaccaaagaacgcggtagca

SEQ ID NO: 5247 - DNA, 35 bp, Artificial Sequence
  Synthetic oligonucleotide
acccacggggccactccgaattaatccggatgccc

SEQ ID NO: 5248 - DNA, 36 bp, Artificial Sequence
  Synthetic oligonucleotide
gactgggagcgtacgacagtaaagctctggtatcca

SEQ ID NO: 5249 - DNA, 36 bp, Artificial Sequence
  Synthetic oligonucleotide
aacgacacaacctcacatttactttctcggagtgta

SEQ ID NO: 5250 - DNA, 35 bp, Artificial Sequence
  Synthetic oligonucleotide
aacgcccgcccaagattacgaggcacatgcttgct

SEQ ID NO: 5251 - DNA, 38 bp, Artificial Sequence
  Synthetic oligonucleotide
tgcacatgcgggtgtgaagtcgttatcagcacatatga

SEQ ID NO: 5252 - DNA, 36 bp, Artificial Sequence
  Synthetic oligonucleotide
ggtgcaccacgataatcttccactcgtcacacttca

SEQ ID NO: 5253 - DNA, 35 bp, Artificial Sequence
  Synthetic oligonucleotide
taggccaacaccacaacactctcggccgaattcgt

SEQ ID NO: 5254 - DNA, 38 bp, Artificial Sequence
  Synthetic oligonucleotide
acccgcgacgggtcgtgcaaaaagtcgaagggcattga

SEQ ID NO: 5255 - DNA, 36 bp, Artificial Sequence
  Synthetic oligonucleotide
atgccgccatcagtagtaactggaagtttcgtcgta

SEQ ID NO: 5256 - DNA, 37 bp, Artificial Sequence
  Synthetic oligonucleotide
gcaaccacaccgttgacagaagtctcgcgctgattga

SEQ ID NO: 5257 - DNA, 38 bp, Artificial Sequence
  Synthetic oligonucleotide
tacgaccgactcggagcgtaccagtttcccaaaactga

SEQ ID NO: 5258 - DNA, 36 bp, Artificial Sequence
  Synthetic oligonucleotide
aacacgcaaggtacgtatcctggagacatgaccaac

SEQ ID NO: 5259 - DNA, 38 bp, Artificial Sequence
  Synthetic oligonucleotide
gacacgtgacatagcgcgtaagattttgacctgcttga

SEQ ID NO: 5260 - DNA, 35 bp, Artificial Sequence
  Synthetic oligonucleotide
ccccacgccaagggtgaaatttaccgttattcacc

SEQ ID NO: 5261 - DNA, 38 bp, Artificial Sequence
  Synthetic oligonucleotide
gacccacgtgcagacttcctttttagcacatgcattga

SEQ ID NO: 5262 - DNA, 36 bp, Artificial Sequence
  Synthetic oligonucleotide
acacaccgtggtagagaatggccagattaggcaata

SEQ ID NO: 5263 - DNA, 38 bp, Artificial Sequence
  Synthetic oligonucleotide
gacgccgggagatcgtgtattctcggaagttgttgtga

SEQ ID NO: 5264 - DNA, 38 bp, Artificial Sequence
  Synthetic oligonucleotide
tacatccgcgtaccaagagaatattgatcggtgtatga

SEQ ID NO: 5265 - DNA, 36 bp, Artificial Sequence
  Synthetic oligonucleotide
acaccacagaaggcgaattgggggttcgagaagcaa

SEQ ID NO: 5266 - DNA, 36 bp, Artificial Sequence
  Synthetic oligonucleotide
acgcgaggcctgcgagcacagatcctgtcattgtca

SEQ ID NO: 5267 - DNA, 35 bp, Artificial Sequence
  Synthetic oligonucleotide
atcgacacacgccatcctcatccgactccaccgct

SEQ ID NO: 5268 - DNA, 38 bp, Artificial Sequence
  Synthetic oligonucleotide
cacgaagactgtgtttgagtaccgcgtatgtacactga

SEQ ID NO: 5269 - DNA, 37 bp, Artificial Sequence
  Synthetic oligonucleotide
gcatcgctaaagtcagacccccgagacaagtacggga

SEQ ID NO: 5270 - DNA, 38 bp, Artificial Sequence
  Synthetic oligonucleotide
tccaaagccagaggataaggctcatgagttagcgatga

SEQ ID NO: 5271 - DNA, 37 bp, Artificial Sequence
  Synthetic oligonucleotide
acacaagcgcatcggtagggatcggagtgctcatcga

SEQ ID NO: 5272 - DNA, 36 bp, Artificial Sequence
  Synthetic oligonucleotide
cacatccggatggtgaacaggatatctcagtgtgga

SEQ ID NO: 5273 - DNA, 35 bp, Artificial Sequence
  Synthetic oligonucleotide
gatgccccagcctccggagcttagctaggcttgct

SEQ ID NO: 5274 - DNA, 36 bp, Artificial Sequence
  Synthetic oligonucleotide
tacgtgccaagccatcatcttcacatgcgcatttaa

SEQ ID NO: 5275 - DNA, 37 bp, Artificial Sequence
  Synthetic oligonucleotide
gtggcggagctggaatggggccatgacaggaggatga

SEQ ID NO: 5276 - DNA, 36 bp, Artificial Sequence
  Synthetic oligonucleotide
tccacgaacgcgacatgacttcagttcctctttaca

SEQ ID NO: 5277 - DNA, 37 bp, Artificial Sequence
  Synthetic oligonucleotide
aacacactgaccccggagcacgccaaggagatgtaga

SEQ ID NO: 5278 - DNA, 36 bp, Artificial Sequence
  Synthetic oligonucleotide
accatgtcccgcacgtatgatctgggtccaagccta

SEQ ID NO: 5279 - DNA, 35 bp, Artificial Sequence
  Synthetic oligonucleotide
gaccgcaccatcatcaacgatcggtcacttcttga

SEQ ID NO: 5280 - DNA, 38 bp, Artificial Sequence
  Synthetic oligonucleotide
tcaatcgcagcaacctcgaatggatgatcgacgcgtga

SEQ ID NO: 5281 - DNA, 35 bp, Artificial Sequence
  Synthetic oligonucleotide
tctcgaagggctctcgctgtcaagaggccctgatg

SEQ ID NO: 5282 - DNA, 36 bp, Artificial Sequence
  Synthetic oligonucleotide
acacgaaccaggcaaccccgactacactgaccccca

SEQ ID NO: 5283 - DNA, 38 bp, Artificial Sequence
  Synthetic oligonucleotide
gaacgagccaggtggtaatgcatggcacaacgtcgtga

SEQ ID NO: 5284 - DNA, 38 bp, Artificial Sequence
  Synthetic oligonucleotide
gacgatgggggagagagttagcgtccagtcgggcatga

SEQ ID NO: 5285 - DNA, 36 bp, Artificial Sequence
  Synthetic oligonucleotide
tcagcaagttcaccccgacaccaaccccgtgagcta

SEQ ID NO: 5286 - DNA, 38 bp, Artificial Sequence
  Synthetic oligonucleotide
tccgaaccacaccgacaaacgccatcagtactggctga

SEQ ID NO: 5287 - DNA, 36 bp, Artificial Sequence
  Synthetic oligonucleotide
gacgaccggagtgatcagccgaagttaatcctcgaa

SEQ ID NO: 5288 - DNA, 37 bp, Artificial Sequence
  Synthetic oligonucleotide
gccaccatcacgagttacgttttagtcatgttagtga

SEQ ID NO: 5289 - DNA, 35 bp, Artificial Sequence
  Synthetic oligonucleotide
taccaccaggcgaacggctttcggaacaggggctt

SEQ ID NO: 5290 - DNA, 35 bp, Artificial Sequence
  Synthetic oligonucleotide
gaagaccgcgccaacatcattttccatccaatacc

SEQ ID NO: 5291 - DNA, 36 bp, Artificial Sequence
  Synthetic oligonucleotide
aagcccaccctcgccaagacaccactcgaaaccgta

SEQ ID NO: 5292 - DNA, 35 bp, Artificial Sequence
  Synthetic oligonucleotide
atcacaccgcatgagcaaatcgccgatcctaccgt

SEQ ID NO: 5293 - DNA, 37 bp, Artificial Sequence
  Synthetic oligonucleotide
gcccacgcatgtaaagccagtatacaccgttatacga

SEQ ID NO: 5294 - DNA, 38 bp, Artificial Sequence
  Synthetic oligonucleotide
tgcgagagcgaatccactgtggcgaagatgacggatga

SEQ ID NO: 5295 - DNA, 37 bp, Artificial Sequence
  Synthetic oligonucleotide
tagaccagccgcgatgccagtggttggttacgaacga

SEQ ID NO: 5296 - DNA, 36 bp, Artificial Sequence
  Synthetic oligonucleotide
gtacaccgaccccgctaaacaaagagactgtgcgca

SEQ ID NO: 5297 - DNA, 35 bp, Artificial Sequence
  Synthetic oligonucleotide
tgacatgggcggcactcgtagcgctaggttgtagt

SEQ ID NO: 5298 - DNA, 35 bp, Artificial Sequence
  Synthetic oligonucleotide
gcacgacaagggataatactcacccgattgctctt

SEQ ID NO: 5299 - DNA, 36 bp, Artificial Sequence
  Synthetic oligonucleotide
tacgcaaagtggcaacaacaccattctgcagtcata

SEQ ID NO: 5300 - DNA, 36 bp, Artificial Sequence
  Synthetic oligonucleotide
catgaaccgccctccgaaacctggatttcgagatca

SEQ ID NO: 5301 - DNA, 38 bp, Artificial Sequence
  Synthetic oligonucleotide
gccaccctgcccgctactatctccagtcccaatcatga

SEQ ID NO: 5302 - DNA, 35 bp, Artificial Sequence
  Synthetic oligonucleotide
tagccacccaactggaaggtcgtgaccatactctg

SEQ ID NO: 5303 - DNA, 38 bp, Artificial Sequence
  Synthetic oligonucleotide
gcaaccgcaagtcataaatggtaacgagttgctagtga

SEQ ID NO: 5304 - DNA, 36 bp, Artificial Sequence
  Synthetic oligonucleotide
gacgcacgtcacggctggaagagagctacaccttaa

SEQ ID NO: 5305 - DNA, 37 bp, Artificial Sequence
  Synthetic oligonucleotide
tcaccacgtgggagtccaaatgaccgtccttgggcga

SEQ ID NO: 5306 - DNA, 35 bp, Artificial Sequence
  Synthetic oligonucleotide
tgcacaaccggcaatggatgcggtccatactaatg

SEQ ID NO: 5307 - DNA, 35 bp, Artificial Sequence
  Synthetic oligonucleotide
aacaccgtccggatgttagaagtatagcagtcatc

SEQ ID NO: 5308 - DNA, 36 bp, Artificial Sequence
  Synthetic oligonucleotide
gaacctgcccatatcaggagactagtcacatcatca

SEQ ID NO: 5309 - DNA, 36 bp, Artificial Sequence
  Synthetic oligonucleotide
gacgcgtgggtgcatcaacaggcgagggtgcgtgaa

SEQ ID NO: 5310 - DNA, 37 bp, Artificial Sequence
  Synthetic oligonucleotide
gactgtcagacgtaagcgaatatgaggaggcgtggga

SEQ ID NO: 5311 - DNA, 38 bp, Artificial Sequence
  Synthetic oligonucleotide
gcaccacacggagtgatgccgcagtcttattcggttga

SEQ ID NO: 5312 - DNA, 35 bp, Artificial Sequence
  Synthetic oligonucleotide
gacaccgcctcaagacatcgcacgcattgagtcga

SEQ ID NO: 5313 - DNA, 36 bp, Artificial Sequence
  Synthetic oligonucleotide
gcccaatacctgagcgccaaaaccgtcgtctaaaca

SEQ ID NO: 5314 - DNA, 37 bp, Artificial Sequence
  Synthetic oligonucleotide
gacaagacgcatagattggaaggagcgcccacaccga

SEQ ID NO: 5315 - DNA, 35 bp, Artificial Sequence
  Synthetic oligonucleotide
gacccccaggtacaggacctgagtgtccccagaca

SEQ ID NO: 5316 - DNA, 35 bp, Artificial Sequence
  Synthetic oligonucleotide
gacgacaggaaggccagtcgtacatgggagttagt

SEQ ID NO: 5317 - DNA, 38 bp, Artificial Sequence
  Synthetic oligonucleotide
gtcgcagtacgggataaagacatgtcgatgtatactga

SEQ ID NO: 5318 - DNA, 38 bp, Artificial Sequence
  Synthetic oligonucleotide
gcacacccagtaaggtgagaccgtccatcaacgaatga

SEQ ID NO: 5319 - DNA, 35 bp, Artificial Sequence
  Synthetic oligonucleotide
accgaagccgctcccatccgttatcgaccctcggc

SEQ ID NO: 5320 - DNA, 35 bp, Artificial Sequence
  Synthetic oligonucleotide
accctccacagtcgatcgtgaatgagtgggaatgt

SEQ ID NO: 5321 - DNA, 38 bp, Artificial Sequence
  Synthetic oligonucleotide
tcacaccggaggcggtgaaaaatctactgtgagcgtga

SEQ ID NO: 5322 - DNA, 35 bp, Artificial Sequence
  Synthetic oligonucleotide
gaacacacgccatggctcatgcataacctatctgt

SEQ ID NO: 5323 - DNA, 37 bp, Artificial Sequence
  Synthetic oligonucleotide
tgacgcgacaatggaaacgtagcctgccactggatga

SEQ ID NO: 5324 - DNA, 36 bp, Artificial Sequence
  Synthetic oligonucleotide
aacccgccgcccaactgtagtcttccattacaccga

SEQ ID NO: 5325 - DNA, 35 bp, Artificial Sequence
  Synthetic oligonucleotide
accgactccactatcgcctaccgaccccgtgcctc

SEQ ID NO: 5326 - DNA, 38 bp, Artificial Sequence
  Synthetic oligonucleotide
gtacaccccaatgaactaagtgccgtactcatcgctga

SEQ ID NO: 5327 - DNA, 38 bp, Artificial Sequence
  Synthetic oligonucleotide
gcacaagcggaagattgcaacgatacgaacctacatga

SEQ ID NO: 5328 - DNA, 35 bp, Artificial Sequence
  Synthetic oligonucleotide
tacccaccgctgactcatccgcattgactgtcatg

SEQ ID NO: 5329 - DNA, 36 bp, Artificial Sequence
  Synthetic oligonucleotide
gacagggagaggtgggagacgtggtttggaggacaa

SEQ ID NO: 5330 - DNA, 35 bp, Artificial Sequence
  Synthetic oligonucleotide
gaccccgaattttggcaaaccgaccccgtatcgcc

SEQ ID NO: 5331 - DNA, 36 bp, Artificial Sequence
  Synthetic oligonucleotide
taactacgcccatagacgcaacagacccccagacca

SEQ ID NO: 5332 - DNA, 35 bp, Artificial Sequence
  Synthetic oligonucleotide
tcgatcgacgcctccagacttgcacttcgactgtt

SEQ ID NO: 5333 - DNA, 35 bp, Artificial Sequence
  Synthetic oligonucleotide
accgagcgacaactgaagaaagacggcatcatcac

SEQ ID NO: 5334 - DNA, 37 bp, Artificial Sequence
  Synthetic oligonucleotide
gacccgggtagggacaggggtaagacgggtcatcgga

SEQ ID NO: 5335 - DNA, 35 bp, Artificial Sequence
  Synthetic oligonucleotide
ggtccgcgtagacccccagccacgttcctatggat

SEQ ID NO: 5336 - DNA, 35 bp, Artificial Sequence
  Synthetic oligonucleotide
tcatggagccgccctctcacacaagacggtctagc

SEQ ID NO: 5337 - DNA, 35 bp, Artificial Sequence
  Synthetic oligonucleotide
atccaacagagccgacatgccaccttctcaatctt

SEQ ID NO: 5338 - DNA, 35 bp, Artificial Sequence
  Synthetic oligonucleotide
gaaacgcgcccacgagtttcacgggactgctcaca

SEQ ID NO: 5339 - DNA, 35 bp, Artificial Sequence
  Synthetic oligonucleotide
gatgcacgacgaaaagtggcgtccctctcggggag

SEQ ID NO: 5340 - DNA, 36 bp, Artificial Sequence
  Synthetic oligonucleotide
tatggacgcaggcatatcgtcatgatgcaatgtata

SEQ ID NO: 5341 - DNA, 38 bp, Artificial Sequence
  Synthetic oligonucleotide
aacgacgaagacggttaaacgcggtcattttccactga

SEQ ID NO: 5342 - DNA, 38 bp, Artificial Sequence
  Synthetic oligonucleotide
gaccacctcaaaaaaacattgtcaccttcgtgtggtga

SEQ ID NO: 5343 - DNA, 36 bp, Artificial Sequence
  Synthetic oligonucleotide
tcactcacgcaacgaataaaagagcgatgtgaccca

SEQ ID NO: 5344 - DNA, 35 bp, Artificial Sequence
  Synthetic oligonucleotide
agacacaacaccggcaatacagcgacaagcagaag

SEQ ID NO: 5345 - DNA, 36 bp, Artificial Sequence
  Synthetic oligonucleotide
atgccacgccaatgttatctgcgcccccaggctcca

SEQ ID NO: 5346 - DNA, 36 bp, Artificial Sequence
  Synthetic oligonucleotide
acacgtacaacaactgaccccgttacattccaacaa

SEQ ID NO: 5347 - DNA, 36 bp, Artificial Sequence
  Synthetic oligonucleotide
agcaccacgaggcaaagtacatcggcgaaatgcaaa

SEQ ID NO: 5348 - DNA, 38 bp, Artificial Sequence
  Synthetic oligonucleotide
actgcgggcctcagacgcactgaccccgaactctttga

SEQ ID NO: 5349 - DNA, 36 bp, Artificial Sequence
  Synthetic oligonucleotide
gcccgggagggccgaatcgcattacgcaaccgcaca

SEQ ID NO: 5350 - DNA, 35 bp, Artificial Sequence
  Synthetic oligonucleotide
tcaccaaccccacaaacacgctcgttccagttcga

SEQ ID NO: 5351 - DNA, 35 bp, Artificial Sequence
  Synthetic oligonucleotide
aacatgcgcataaggtaaagaacgttgggacgtct

SEQ ID NO: 5352 - DNA, 36 bp, Artificial Sequence
  Synthetic oligonucleotide
accaagcctccaccacagtaaaacaagtcggtttta

SEQ ID NO: 5353 - DNA, 37 bp, Artificial Sequence
  Synthetic oligonucleotide
accacacccgtacgcacatagtctccgagacctgcga

SEQ ID NO: 5354 - DNA, 36 bp, Artificial Sequence
  Synthetic oligonucleotide
accacgcatcagaggaacgtgctggacggacgacga

SEQ ID NO: 5355 - DNA, 36 bp, Artificial Sequence
  Synthetic oligonucleotide
acccggcttagctataggtttacggggtgcgtatga

SEQ ID NO: 5356 - DNA, 36 bp, Artificial Sequence
  Synthetic oligonucleotide
gaccaccgcgtaaagttggggagtacaagtgggtta

SEQ ID NO: 5357 - DNA, 37 bp, Artificial Sequence
  Synthetic oligonucleotide
tgtggaggctggagggaagtggtaggttggtttagga

SEQ ID NO: 5358 - DNA, 36 bp, Artificial Sequence
  Synthetic oligonucleotide
acaccacggcctaggaatgtaagctggcgtgcgcaa

SEQ ID NO: 5359 - DNA, 37 bp, Artificial Sequence
  Synthetic oligonucleotide
actgccacgcaaccgacccattaaagcacgtggccga

SEQ ID NO: 5360 - DNA, 37 bp, Artificial Sequence
  Synthetic oligonucleotide
gatgggcgctaaacgttaggcaagcacagtgggttga

SEQ ID NO: 5361 - DNA, 37 bp, Artificial Sequence
  Synthetic oligonucleotide
tagcgccggcacactcgtcgattttttatggcttgga

SEQ ID NO: 5362 - DNA, 37 bp, Artificial Sequence
  Synthetic oligonucleotide
tatgcacccacgccaagctgcgcctcgccaccatgga

SEQ ID NO: 5363 - DNA, 38 bp, Artificial Sequence
  Synthetic oligonucleotide
tccaccccgcctaacgtgcacgtcattgcgaaccctga

SEQ ID NO: 5364 - DNA, 35 bp, Artificial Sequence
  Synthetic oligonucleotide
actgaccccgttactcaatcaacagacctatatat

SEQ ID NO: 5365 - DNA, 35 bp, Artificial Sequence
  Synthetic oligonucleotide
tccatccagcccacaacacctaaacagacacactt

SEQ ID NO: 5366 - DNA, 36 bp, Artificial Sequence
  Synthetic oligonucleotide
tatgcatcccgaaattattgtcggacactcatggga

SEQ ID NO: 5367 - DNA, 38 bp, Artificial Sequence
  Synthetic oligonucleotide
gaagcaccgccgctgattccaccacttgcacgagatga

SEQ ID NO: 5368 - DNA, 35 bp, Artificial Sequence
  Synthetic oligonucleotide
gcccaatgcgcaaccactcaactggcggacaaccg

SEQ ID NO: 5369 - DNA, 38 bp, Artificial Sequence
  Synthetic oligonucleotide
tgacgcgacaatcggcaaacatgtcacattctgtttga

SEQ ID NO: 5370 - DNA, 38 bp, Artificial Sequence
  Synthetic oligonucleotide
tagcacaccaaagcgatagtggtcaacttacaagctga

SEQ ID NO: 5371 - DNA, 36 bp, Artificial Sequence
  Synthetic oligonucleotide
gccgaaggcgggtgagatagggtctggtgtcagcaa

SEQ ID NO: 5372 - DNA, 36 bp, Artificial Sequence
  Synthetic oligonucleotide
gtgcgcacacccttgggataactaggccgttactca

SEQ ID NO: 5373 - DNA, 35 bp, Artificial Sequence
  Synthetic oligonucleotide
tccactgtccatccgcgatatccggtaggaccact

SEQ ID NO: 5374 - DNA, 38 bp, Artificial Sequence
  Synthetic oligonucleotide
atgccctcacaccagcaagaaacttcagccatgcgtga

SEQ ID NO: 5375 - DNA, 35 bp, Artificial Sequence
  Synthetic oligonucleotide
ctcgagaagcggaacgcacataatgttgatcgagc

SEQ ID NO: 5376 - DNA, 36 bp, Artificial Sequence
  Synthetic oligonucleotide
gcacatagggcgtatcataccgaccgactgatacca

SEQ ID NO: 5377 - DNA, 35 bp, Artificial Sequence
  Synthetic oligonucleotide
gccaaaagccggttagcctgaactagacagatgcc

SEQ ID NO: 5378 - DNA, 38 bp, Artificial Sequence
  Synthetic oligonucleotide
tgtgggagcacgagcgggaggtaagcggatgatcatga

SEQ ID NO: 5379 - DNA, 35 bp, Artificial Sequence
  Synthetic oligonucleotide
atcgcacaccccaccgtatgtaaaaagtcacttcc

SEQ ID NO: 5380 - DNA, 36 bp, Artificial Sequence
  Synthetic oligonucleotide
gacgcaaccataatgatcgtacgttaccaactccca

SEQ ID NO: 5381 - DNA, 35 bp, Artificial Sequence
  Synthetic oligonucleotide
gatgcgcgtaggtcatggtagtgccgcatccgtcg

SEQ ID NO: 5382 - DNA, 35 bp, Artificial Sequence
  Synthetic oligonucleotide
gcacggagggcacttgatcggcttgttaccatgcc

SEQ ID NO: 5383 - DNA, 36 bp, Artificial Sequence
  Synthetic oligonucleotide
acagctcccggcccgacccatcggtgacgctgaaga

SEQ ID NO: 5384 - DNA, 36 bp, Artificial Sequence
  Synthetic oligonucleotide
gtggacgaacatatgtacattatgagtctcttgtaa

SEQ ID NO: 5385 - DNA, 38 bp, Artificial Sequence
  Synthetic oligonucleotide
tcacacggacgtaatgcatcaagcaaagattggggtga

SEQ ID NO: 5386 - DNA, 36 bp, Artificial Sequence
  Synthetic oligonucleotide
gaacatcccaatgcctgaagcatcagacacaacgta

SEQ ID NO: 5387 - DNA, 36 bp, Artificial Sequence
  Synthetic oligonucleotide
gatgtcgtacaggaggatatggcaaagtgatagaca

SEQ ID NO: 5388 - DNA, 36 bp, Artificial Sequence
  Synthetic oligonucleotide
gcaaagcgaccccactgaccccggccttatactcga

SEQ ID NO: 5389 - DNA, 36 bp, Artificial Sequence
  Synthetic oligonucleotide
gccccccgtcgattgttgagggccatctctcgacta

SEQ ID NO: 5390 - DNA, 35 bp, Artificial Sequence
  Synthetic oligonucleotide
tcgcgagccatctactgaccccgtattcttaacaa

SEQ ID NO: 5391 - DNA, 36 bp, Artificial Sequence
  Synthetic oligonucleotide
atgcaacacaagggacgaacgaatggagcgtgcgca

SEQ ID NO: 5392 - DNA, 36 bp, Artificial Sequence
  Synthetic oligonucleotide
gaccccgcagacgcttatacaaggttatggtagcca

SEQ ID NO: 5393 - DNA, 37 bp, Artificial Sequence
  Synthetic oligonucleotide
gacggacgcaagcttgagggtaaagttacggaattga

SEQ ID NO: 5394 - DNA, 37 bp, Artificial Sequence
  Synthetic oligonucleotide
gcaccatcaggctggatccagaccatcaaatgtaaga

SEQ ID NO: 5395 - DNA, 37 bp, Artificial Sequence
  Synthetic oligonucleotide
tacgcatccacattgggatgtgagaaaaaccgaccga

SEQ ID NO: 5396 - DNA, 37 bp, Artificial Sequence
  Synthetic oligonucleotide
tatgccacagctgttacccagaggacatgtggttaga

SEQ ID NO: 5397 - DNA, 35 bp, Artificial Sequence
  Synthetic oligonucleotide
atgccggaaccaaaagctgtggacgaaggtgatac

SEQ ID NO: 5398 - DNA, 36 bp, Artificial Sequence
  Synthetic oligonucleotide
gatgcgcgccagcttcacggacatccgcttgtacga

SEQ ID NO: 5399 - DNA, 37 bp, Artificial Sequence
  Synthetic oligonucleotide
gccgagaggagggctaaccaggccgaggacgttggga

SEQ ID NO: 5400 - DNA, 36 bp, Artificial Sequence
  Synthetic oligonucleotide
acacccaagcagtcgagcgctaaaagtacctaggga

SEQ ID NO: 5401 - DNA, 37 bp, Artificial Sequence
  Synthetic oligonucleotide
gccaagccaccgtattaaggccgtacttctaaactga

SEQ ID NO: 5402 - DNA, 35 bp, Artificial Sequence
  Synthetic oligonucleotide
gccgcaggccgtccgcatcgatcgctcccaatatc

SEQ ID NO: 5403 - DNA, 38 bp, Artificial Sequence
  Synthetic oligonucleotide
acccgaagcgaggagaggccacgttctgtattgcttga

SEQ ID NO: 5404 - DNA, 35 bp, Artificial Sequence
  Synthetic oligonucleotide
gacgcacagtagtttgacgtactgtgttatactcc

SEQ ID NO: 5405 - DNA, 37 bp, Artificial Sequence
  Synthetic oligonucleotide
gcacgccttaggtgtgcgcagacaatggtaaacttga

SEQ ID NO: 5406 - DNA, 37 bp, Artificial Sequence
  Synthetic oligonucleotide
gagggccaccgtaatgcgtctcgaaaacaggaggtga

SEQ ID NO: 5407 - DNA, 36 bp, Artificial Sequence
  Synthetic oligonucleotide
gatgcatgacatgcatagatcttactaaaacactta

SEQ ID NO: 5408 - DNA, 38 bp, Artificial Sequence
  Synthetic oligonucleotide
gccaacacgcaactgaaacgactttcacaaagggttga

SEQ ID NO: 5409 - DNA, 36 bp, Artificial Sequence
  Synthetic oligonucleotide
gccgagacacgtggtacgtccacagacaattctaga

SEQ ID NO: 5410 - DNA, 37 bp, Artificial Sequence
  Synthetic oligonucleotide
gcaccagaagtatactgaccccgctatctacctttga

SEQ ID NO: 5411 - DNA, 37 bp, Artificial Sequence
  Synthetic oligonucleotide
tccgacggagcttccagtatgttacactctgacacga

SEQ ID NO: 5412 - DNA, 35 bp, Artificial Sequence
  Synthetic oligonucleotide
gcaggacaccccctcattatttgtttcatcctaag

SEQ ID NO: 5413 - DNA, 38 bp, Artificial Sequence
  Synthetic oligonucleotide
gccgagctaccccgtgagtccagctcccgaccccgtga

SEQ ID NO: 5414 - DNA, 36 bp, Artificial Sequence
  Synthetic oligonucleotide
tccgcacgggctgccgtgagcacaggtgatacccca

SEQ ID NO: 5415 - DNA, 35 bp, Artificial Sequence
  Synthetic oligonucleotide
tgagaccgcagagtagtgtataggtcgtgattacc

SEQ ID NO: 5416 - DNA, 35 bp, Artificial Sequence
  Synthetic oligonucleotide
tccaatgccactcctgagccatatgaacgcgatag

SEQ ID NO: 5417 - DNA, 37 bp, Artificial Sequence
  Synthetic oligonucleotide
tgcccaccaagataaaaatgacacaatcgaggtcgga

SEQ ID NO: 5418 - DNA, 37 bp, Artificial Sequence
  Synthetic oligonucleotide
acaacgccatcatgattgagataagcagaggttacga

SEQ ID NO: 5419 - DNA, 36 bp, Artificial Sequence
  Synthetic oligonucleotide
acacacagcacacattccacctcgccagttcactga

SEQ ID NO: 5420 - DNA, 38 bp, Artificial Sequence
  Synthetic oligonucleotide
gacgacgactggaagctcacgtgacttgccacccttga

SEQ ID NO: 5421 - DNA, 36 bp, Artificial Sequence
  Synthetic oligonucleotide
gcacagcagtccataagcatccttagaccgtcccaa

SEQ ID NO: 5422 - DNA, 36 bp, Artificial Sequence
  Synthetic oligonucleotide
cagtgcgcatcggtgtgactcgtgacacgtgtttaa

SEQ ID NO: 5423 - DNA, 36 bp, Artificial Sequence
  Synthetic oligonucleotide
ggacaatcgctgcccagatctgttcagtcatcgaaa

SEQ ID NO: 5424 - DNA, 35 bp, Artificial Sequence
  Synthetic oligonucleotide
tacatcgagcatggtagggatcacgcggacggacg

SEQ ID NO: 5425 - DNA, 37 bp, Artificial Sequence
  Synthetic oligonucleotide
ttggaggacggtggggtgtctcaggtggaggggtaaa

SEQ ID NO: 5426 - DNA, 38 bp, Artificial Sequence
  Synthetic oligonucleotide
aacgcatgacgggcatcctaaatgaagtgacgtattga

SEQ ID NO: 5427 - DNA, 37 bp, Artificial Sequence
  Synthetic oligonucleotide
gagacgggaagcgtagaaagagaagggaagcccacga

SEQ ID NO: 5428 - DNA, 38 bp, Artificial Sequence
  Synthetic oligonucleotide
gtcacgccgggtgagtgttgactaaaacgtatccgtga

SEQ ID NO: 5429 - DNA, 36 bp, Artificial Sequence
  Synthetic oligonucleotide
tccgagccaacgaactgtaagggcgatcccaatcca

SEQ ID NO: 5430 - DNA, 36 bp, Artificial Sequence
  Synthetic oligonucleotide
tgcaacgacaaccgtcatggcgaagacccccagaca

SEQ ID NO: 5431 - DNA, 38 bp, Artificial Sequence
  Synthetic oligonucleotide
gcagggggcgtgggcgcacctgagtttggcttgggaga

SEQ ID NO: 5432 - DNA, 37 bp, Artificial Sequence
  Synthetic oligonucleotide
gtcaccgcacaccgtccagccaggtatccacacttga

SEQ ID NO: 5433 - DNA, 35 bp, Artificial Sequence
  Synthetic oligonucleotide
taacgcaccaagcatgacataggatccttaagttt

SEQ ID NO: 5434 - DNA, 37 bp, Artificial Sequence
  Synthetic oligonucleotide
gaaccagcagtcgcactgaccacactctatcgcatga

SEQ ID NO: 5435 - DNA, 35 bp, Artificial Sequence
  Synthetic oligonucleotide
tcaaccgtccctcaccatccgtacctaacctgacc

SEQ ID NO: 5436 - DNA, 36 bp, Artificial Sequence
  Synthetic oligonucleotide
aaacacctgaccccgaaaacgacactcgcaggacga

SEQ ID NO: 5437 - DNA, 35 bp, Artificial Sequence
  Synthetic oligonucleotide
gacacgcagccacgtaataatggactcagtcttag

SEQ ID NO: 5438 - DNA, 37 bp, Artificial Sequence
  Synthetic oligonucleotide
tcacgccctgtcgacgatccgttacgcctgctaatga

SEQ ID NO: 5439 - DNA, 38 bp, Artificial Sequence
  Synthetic oligonucleotide
aaccacacgcatcagtgactgagctaacccacgagtga

SEQ ID NO: 5440 - DNA, 35 bp, Artificial Sequence
  Synthetic oligonucleotide
accgccggtcatgccacactcgggctcatatcaag

SEQ ID NO: 5441 - DNA, 35 bp, Artificial Sequence
  Synthetic oligonucleotide
gacgcacggcgcacggagtaataagttaacagggt

SEQ ID NO: 5442 - DNA, 36 bp, Artificial Sequence
  Synthetic oligonucleotide
gactgaccccgtgcaaaaaaccccgagtaatcctaa

SEQ ID NO: 5443 - DNA, 35 bp, Artificial Sequence
  Synthetic oligonucleotide
gcagccaggacccccagacccgaagcgttagcgct

SEQ ID NO: 5444 - DNA, 37 bp, Artificial Sequence
  Synthetic oligonucleotide
gctgatcaccgccgccttcaaaaagtcccagttcgga

SEQ ID NO: 5445 - DNA, 37 bp, Artificial Sequence
  Synthetic oligonucleotide
gtcgaaggcacgtacggtgtcctaaggaagggaatga

SEQ ID NO: 5446 - DNA, 35 bp, Artificial Sequence
  Synthetic oligonucleotide
ttgccgaccgccaagagagcgtacatcaagccgag

SEQ ID NO: 5447 - DNA, 37 bp, Artificial Sequence
  Synthetic oligonucleotide
acagacccacgtccgagctgtctaatggcatactaga

SEQ ID NO: 5448 - DNA, 37 bp, Artificial Sequence
  Synthetic oligonucleotide
gacacgcggactcggtacgttaaagcagcctcgtcga

SEQ ID NO: 5449 - DNA, 35 bp, Artificial Sequence
  Synthetic oligonucleotide
gacgcgcacggcaatactacagattcaacagcaac

SEQ ID NO: 5450 - DNA, 36 bp, Artificial Sequence
  Synthetic oligonucleotide
gatgcgcgaccgtctggatgtgaaacgtagctgtca

SEQ ID NO: 5451 - DNA, 35 bp, Artificial Sequence
  Synthetic oligonucleotide
tgacgcactagcaacggcataacgcccactccgtc

SEQ ID NO: 5452 - DNA, 38 bp, Artificial Sequence
  Synthetic oligonucleotide
gacacccggcggatacgctatcctcagttaggaactga

SEQ ID NO: 5453 - DNA, 38 bp, Artificial Sequence
  Synthetic oligonucleotide
tacaccgaccagtctcaactcatatgttacaggcatga

SEQ ID NO: 5454 - DNA, 35 bp, Artificial Sequence
  Synthetic oligonucleotide
tgacgcacccggaccagcaccgatcctacactact

SEQ ID NO: 5455 - DNA, 35 bp, Artificial Sequence
  Synthetic oligonucleotide
gaacacaccagcccacagggatgacgaaggaatgc

SEQ ID NO: 5456 - DNA, 35 bp, Artificial Sequence
  Synthetic oligonucleotide
gaaccctgcaacactggtcagactgctgttgtgtg

SEQ ID NO: 5457 - DNA, 35 bp, Artificial Sequence
  Synthetic oligonucleotide
gcccggccgccgactatctactgaccccgcaatcc

SEQ ID NO: 5458 - DNA, 36 bp, Artificial Sequence
  Synthetic oligonucleotide
gctacccacaacaccaccagagcgatccaagacgaa

SEQ ID NO: 5459 - DNA, 36 bp, Artificial Sequence
  Synthetic oligonucleotide
tcaatccgcctcagtacccacgtccagattactcaa

SEQ ID NO: 5460 - DNA, 35 bp, Artificial Sequence
  Synthetic oligonucleotide
tcacgccacgttcatggtttattggttgttctcgt

SEQ ID NO: 5461 - DNA, 37 bp, Artificial Sequence
  Synthetic oligonucleotide
tcatgccaaccgttcacagaagggattaagcggaaga

SEQ ID NO: 5462 - DNA, 37 bp, Artificial Sequence
  Synthetic oligonucleotide
tgacacgatccgacagcatgctttcccggtccataga

SEQ ID NO: 5463 - DNA, 36 bp, Artificial Sequence
  Synthetic oligonucleotide
gacacgggtcgccacgggtacattgctagccattga

SEQ ID NO: 5464 - DNA, 35 bp, Artificial Sequence
  Synthetic oligonucleotide
gcaccgaacgatcccaatcggatggaccagtagtc

SEQ ID NO: 5465 - DNA, 34 bp, Artificial Sequence
  Synthetic oligonucleotide
gcgaaacgccagtggtaagtcaccatagcgaagt

SEQ ID NO: 5466 - DNA, 36 bp, Artificial Sequence
  Synthetic oligonucleotide
tcaatcgacaacagggactgggatctgtcgttccca

SEQ ID NO: 5467 - DNA, 35 bp, Artificial Sequence
  Synthetic oligonucleotide
tgacccgcaagtgtcgattaggaagtcttctggct

SEQ ID NO: 5468 - DNA, 38 bp, Artificial Sequence
  Synthetic oligonucleotide
acgccccagccgtacgaccggaactgtcaccccagtga

SEQ ID NO: 5469 - DNA, 38 bp, Artificial Sequence
  Synthetic oligonucleotide
tatcgcgcacagagatgttacaataccgaacgtggtga

SEQ ID NO: 5470 - DNA, 37 bp, Artificial Sequence
  Synthetic oligonucleotide
acaccacgcaccggtcacattttagcgtacggaacga

SEQ ID NO: 5471 - DNA, 37 bp, Artificial Sequence
  Synthetic oligonucleotide
gagacgagagtagggtattggagaagatactttcaga

SEQ ID NO: 5472 - DNA, 35 bp, Artificial Sequence
  Synthetic oligonucleotide
gatagcaccgacgacctctcacggacacaagtacg

SEQ ID NO: 5473 - DNA, 38 bp, Artificial Sequence
  Synthetic oligonucleotide
gcaacacgtcggaatcgtgcgcaggtaaccgaggatga

SEQ ID NO: 5474 - DNA, 36 bp, Artificial Sequence
  Synthetic oligonucleotide
tactgaccccgcaaattccccaacatacggtcgtaa

SEQ ID NO: 5475 - DNA, 36 bp, Artificial Sequence
  Synthetic oligonucleotide
tcgaaccaccactcaggttcaccagtgccgccccta

SEQ ID NO: 5476 - DNA, 35 bp, Artificial Sequence
  Synthetic oligonucleotide
ttgcatgtcgctaaactgaccccgacaactgcctc

SEQ ID NO: 5477 - DNA, 36 bp, Artificial Sequence
  Synthetic oligonucleotide
tacaggcgcgaggaccccccagttggatggacccga

SEQ ID NO: 5478 - DNA, 37 bp, Artificial Sequence
  Synthetic oligonucleotide
accacacccctcaacagttcgcttagcctggagcaga

SEQ ID NO: 5479 - DNA, 35 bp, Artificial Sequence
  Synthetic oligonucleotide
actgcctcccgtcgaagtataaagttagaccggaa

SEQ ID NO: 5480 - DNA, 37 bp, Artificial Sequence
  Synthetic oligonucleotide
gcgagaagccgacaagcctaccctcagagaccaatga

SEQ ID NO: 5481 - DNA, 35 bp, Artificial Sequence
  Synthetic oligonucleotide
tcaacccgaagtcgtgtatcgtcctcacctgctac

SEQ ID NO: 5482 - DNA, 36 bp, Artificial Sequence
  Synthetic oligonucleotide
tgagtcgcctcggtatcccacgagcgtatttcgcta

SEQ ID NO: 5483 - DNA, 36 bp, Artificial Sequence
  Synthetic oligonucleotide
gacgcaaacgcccgaaacggagatctgcagtcccaa

SEQ ID NO: 5484 - DNA, 35 bp, Artificial Sequence
  Synthetic oligonucleotide
gtgcgagcagggaaccactgaagcgcacgttcatt

SEQ ID NO: 5485 - DNA, 36 bp, Artificial Sequence
  Synthetic oligonucleotide
tccccgccacacgctacccaaccacactctacacta

SEQ ID NO: 5486 - DNA, 36 bp, Artificial Sequence
  Synthetic oligonucleotide
acccgcccgagaagcctgaccccgaactgatatgca

SEQ ID NO: 5487 - DNA, 36 bp, Artificial Sequence
  Synthetic oligonucleotide
gacgaacgcagagaggaacagatggtcgctcaagga

SEQ ID NO: 5488 - DNA, 35 bp, Artificial Sequence
  Synthetic oligonucleotide
gagcacatgggtggcgaatagtcacgttacaaatc

SEQ ID NO: 5489 - DNA, 35 bp, Artificial Sequence
  Synthetic oligonucleotide
gatgcaacatcgagcgacattatgaggcctatgat

SEQ ID NO: 5490 - DNA, 37 bp, Artificial Sequence
  Synthetic oligonucleotide
tcacaccgcaacagggtgagggtaggttctagaaaga

SEQ ID NO: 5491 - DNA, 36 bp, Artificial Sequence
  Synthetic oligonucleotide
gtgcggacggagcgcgaattgaacaatagtttgcta

SEQ ID NO: 5492 - DNA, 35 bp, Artificial Sequence
  Synthetic oligonucleotide
gtggacctgcatgtggaatgcgaaaatggaacggc

SEQ ID NO: 5493 - DNA, 37 bp, Artificial Sequence
  Synthetic oligonucleotide
ttgggagggcgcacattcgtcctacaactgaccccga

SEQ ID NO: 5494 - DNA, 36 bp, Artificial Sequence
  Synthetic oligonucleotide
aacacgacgcggaagtgtttgtgggggacacgcaaa

SEQ ID NO: 5495 - DNA, 38 bp, Artificial Sequence
  Synthetic oligonucleotide
aacgcgcacgtgcctacaacttgaaccgtaaggattga

SEQ ID NO: 5496 - DNA, 36 bp, Artificial Sequence
  Synthetic oligonucleotide
actgcgggccggttatcatgcaccagtagccttcta

SEQ ID NO: 5497 - DNA, 35 bp, Artificial Sequence
  Synthetic oligonucleotide
gcacgacgtgagctctaattgactggcaaacaggg

SEQ ID NO: 5498 - DNA, 36 bp, Artificial Sequence
  Synthetic oligonucleotide
aacgccctcgtgtcgaatgacctgaccccgcctaca

SEQ ID NO: 5499 - DNA, 38 bp, Artificial Sequence
  Synthetic oligonucleotide
acaccagccggtgggatggtgtcgtacaaagtcagtga

SEQ ID NO: 5500 - DNA, 36 bp, Artificial Sequence
  Synthetic oligonucleotide
acccggtacgtagctgcgagttttgaaaccacctca

SEQ ID NO: 5501 - DNA, 35 bp, Artificial Sequence
  Synthetic oligonucleotide
gatcgacgccgttagtcctggtgaagagcttgcgt

SEQ ID NO: 5502 - DNA, 37 bp, Artificial Sequence
  Synthetic oligonucleotide
tatgcaacgcacggaacgcacaacaatcaggccacga

SEQ ID NO: 5503 - DNA, 36 bp, Artificial Sequence
  Synthetic oligonucleotide
acacaccacaagtgcgcataacgacgtcgactgtga

SEQ ID NO: 5504 - DNA, 36 bp, Artificial Sequence
  Synthetic oligonucleotide
acacgaacgcaagtgtaagtgtacgaccgcagggaa

SEQ ID NO: 5505 - DNA, 36 bp, Artificial Sequence
  Synthetic oligonucleotide
atcgctgccaagcaaccacctggacgtgctagaaca

SEQ ID NO: 5506 - DNA, 34 bp, Artificial Sequence
  Synthetic oligonucleotide
gaaacggagctgcactgtacagccattaccttaa

SEQ ID NO: 5507 - DNA, 37 bp, Artificial Sequence
  Synthetic oligonucleotide
gatggacaaacggaggaatgcaaagaggcactaagga

SEQ ID NO: 5508 - DNA, 36 bp, Artificial Sequence
  Synthetic oligonucleotide
taccaccgacgctatacaggcgctgcacttcctcta

SEQ ID NO: 5509 - DNA, 38 bp, Artificial Sequence
  Synthetic oligonucleotide
atccaccgcggcaatggtaaaggctatgtttgaataga

SEQ ID NO: 5510 - DNA, 37 bp, Artificial Sequence
  Synthetic oligonucleotide
atgccacacacaagcgaatcccaacgtaagaagtgga

SEQ ID NO: 5511 - DNA, 38 bp, Artificial Sequence
  Synthetic oligonucleotide
gatcacgcccagaattcgagtcccgcgtcctaccctga

SEQ ID NO: 5512 - DNA, 36 bp, Artificial Sequence
  Synthetic oligonucleotide
gtcagacccccagacagatgccgcgtagcctgggta

SEQ ID NO: 5513 - DNA, 35 bp, Artificial Sequence
  Synthetic oligonucleotide
gtcgcaactgtcacacacgaagtttcgttcgatcg

SEQ ID NO: 5514 - DNA, 35 bp, Artificial Sequence
  Synthetic oligonucleotide
tcaagacgcgctacggtgagagacgaggcgattct

SEQ ID NO: 5515 - DNA, 35 bp, Artificial Sequence
  Synthetic oligonucleotide
tgtgccaacgctacgtgccttcagaatccgtcatc

SEQ ID NO: 5516 - DNA, 38 bp, Artificial Sequence
  Synthetic oligonucleotide
gaacacccatcccgattgtgacgtggccagtctggtga

SEQ ID NO: 5517 - DNA, 37 bp, Artificial Sequence
  Synthetic oligonucleotide
gacaccgttatctgacaccgcactatcttgtttccga

SEQ ID NO: 5518 - DNA, 35 bp, Artificial Sequence
  Synthetic oligonucleotide
gtgaacgccccagtgtttacctaaagtgcgaagtt

SEQ ID NO: 5519 - DNA, 35 bp, Artificial Sequence
  Synthetic oligonucleotide
gcaacacaaacacagatgatacacagccatgcgta

SEQ ID NO: 5520 - DNA, 37 bp, Artificial Sequence
  Synthetic oligonucleotide
gcgtgggcgcggtcggttaagaagatgcttagcctga

SEQ ID NO: 5521 - DNA, 35 bp, Artificial Sequence
  Synthetic oligonucleotide
ttgtacgccaactgcctttgaagaccaattttcca

SEQ ID NO: 5522 - DNA, 36 bp, Artificial Sequence
  Synthetic oligonucleotide
acactcggacgaaagctgaactgagaaacccatcga

SEQ ID NO: 5523 - DNA, 35 bp, Artificial Sequence
  Synthetic oligonucleotide
gacagaacacccggcatgctactgaccccgccaat

SEQ ID NO: 5524 - DNA, 38 bp, Artificial Sequence
  Synthetic oligonucleotide
tctaagcccattacgcattcggtcgatatgttccgtga

SEQ ID NO: 5525 - DNA, 35 bp, Artificial Sequence
  Synthetic oligonucleotide
atccaccgctatgtcgacgtcgtactccagataac

SEQ ID NO: 5526 - DNA, 35 bp, Artificial Sequence
  Synthetic oligonucleotide
tagggccgaacatgtagggagatgttccagtatct

SEQ ID NO: 5527 - DNA, 37 bp, Artificial Sequence
  Synthetic oligonucleotide
tgacaacgccatttgctcgaactaccatcccaatgga

SEQ ID NO: 5528 - DNA, 36 bp, Artificial Sequence
  Synthetic oligonucleotide
aacactgccacgtccttcactccagagacctcgaaa

SEQ ID NO: 5529 - DNA, 38 bp, Artificial Sequence
  Synthetic oligonucleotide
acaccttgcgccccagcgataggcaacgacggcgatga

SEQ ID NO: 5530 - DNA, 38 bp, Artificial Sequence
  Synthetic oligonucleotide
acacgccacaaaagtcgaccgcaatcgataccagatga

SEQ ID NO: 5531 - DNA, 35 bp, Artificial Sequence
  Synthetic oligonucleotide
gatgctagccgaccaggccgaaaccgtttagctaa

SEQ ID NO: 5532 - DNA, 34 bp, Artificial Sequence
  Synthetic oligonucleotide
tcacaagcaacgatcgagccgaaacccctacaca

SEQ ID NO: 5533 - DNA, 36 bp, Artificial Sequence
  Synthetic oligonucleotide
acaccccgaccccgaatcaacgtctaaaagtgccga

SEQ ID NO: 5534 - DNA, 38 bp, Artificial Sequence
  Synthetic oligonucleotide
gcgtagccacagacctgacattatctcctcacagttga

SEQ ID NO: 5535 - DNA, 37 bp, Artificial Sequence
  Synthetic oligonucleotide
aaccaccaaccccaccgtggcatatacgttggagtga

SEQ ID NO: 5536 - DNA, 36 bp, Artificial Sequence
  Synthetic oligonucleotide
agacaagcactgaccccgtttcccttcttatagaca

SEQ ID NO: 5537 - DNA, 38 bp, Artificial Sequence
  Synthetic oligonucleotide
gactgcacgaggttaatggatgaacacaggcgaactga

SEQ ID NO: 5538 - DNA, 36 bp, Artificial Sequence
  Synthetic oligonucleotide
gtggtgcagaagcctgtacaaaaaagtcgtcgcaga

SEQ ID NO: 5539 - DNA, 36 bp, Artificial Sequence
  Synthetic oligonucleotide
gactcgcagactacctcgtgcatcttaagcgcatca

SEQ ID NO: 5540 - DNA, 36 bp, Artificial Sequence
  Synthetic oligonucleotide
gcattgccacggtctacgattgatgagacctacaca

SEQ ID NO: 5541 - DNA, 35 bp, Artificial Sequence
  Synthetic oligonucleotide
gtcacaacctcaactaccagacacctgaacctctg

SEQ ID NO: 5542 - DNA, 35 bp, Artificial Sequence
  Synthetic oligonucleotide
aacgctagcaacatcttcacggagacaattggaat

SEQ ID NO: 5543 - DNA, 36 bp, Artificial Sequence
  Synthetic oligonucleotide
actgctgagcactggataagtttgtagcggtgacca

SEQ ID NO: 5544 - DNA, 35 bp, Artificial Sequence
  Synthetic oligonucleotide
attggcgccagtttggcaaagaggcacgtggggta

SEQ ID NO: 5545 - DNA, 38 bp, Artificial Sequence
  Synthetic oligonucleotide
gacgagcctcagtaaaagtcgggaaacgaggagtttga

SEQ ID NO: 5546 - DNA, 36 bp, Artificial Sequence
  Synthetic oligonucleotide
acatgcaaccgtcattgttagcgtaatcgtgcccta

SEQ ID NO: 5547 - DNA, 37 bp, Artificial Sequence
  Synthetic oligonucleotide
atcactggccggtatccggaaagaatgtcagtcggga

SEQ ID NO: 5548 - DNA, 37 bp, Artificial Sequence
  Synthetic oligonucleotide
gcacgaaccccaactactgaccccgcctctaaccgga

SEQ ID NO: 5549 - DNA, 38 bp, Artificial Sequence
  Synthetic oligonucleotide
gccaccacagtgtgtgagtactaccacgtttatcttga

SEQ ID NO: 5550 - DNA, 38 bp, Artificial Sequence
  Synthetic oligonucleotide
tgcacgaacggcgaaatagcgctcgtcaaacactttga

SEQ ID NO: 5551 - DNA, 35 bp, Artificial Sequence
  Synthetic oligonucleotide
ttgaggacgatgggcgacgtgagaatcctgcgaaa

SEQ ID NO: 5552 - DNA, 35 bp, Artificial Sequence
  Synthetic oligonucleotide
gagtacgcgcccataccactgaccccggggaaacc

SEQ ID NO: 5553 - DNA, 35 bp, Artificial Sequence
  Synthetic oligonucleotide
gcaccgagacgtcttagttgggtgcggaattttgg

SEQ ID NO: 5554 - DNA, 35 bp, Artificial Sequence
  Synthetic oligonucleotide
tgccagccctcgtgcacactgccgtgtctttcgta

SEQ ID NO: 5555 - DNA, 38 bp, Artificial Sequence
  Synthetic oligonucleotide
gtgagcacgccgccattacctcaaagacatttgtatga

SEQ ID NO: 5556 - DNA, 35 bp, Artificial Sequence
  Synthetic oligonucleotide
accgaccccgctatgcttcctctaaaccgtcctcg

SEQ ID NO: 5557 - DNA, 37 bp, Artificial Sequence
  Synthetic oligonucleotide
ccggatgtgccccgatccccatccgttaaactgacga

SEQ ID NO: 5558 - DNA, 35 bp, Artificial Sequence
  Synthetic oligonucleotide
gacaccggagcaggaaaagagctaaggcgggtgag

SEQ ID NO: 5559 - DNA, 37 bp, Artificial Sequence
  Synthetic oligonucleotide
gcagacaccagcagtcgtgctggggcactccgaccga

SEQ ID NO: 5560 - DNA, 35 bp, Artificial Sequence
  Synthetic oligonucleotide
gacacaagtcggcgacggtgaagtaaacgtgctcg

SEQ ID NO: 5561 - DNA, 37 bp, Artificial Sequence
  Synthetic oligonucleotide
tcgcaacccccacaccctgaggcatcgactttttcga

SEQ ID NO: 5562 - DNA, 38 bp, Artificial Sequence
  Synthetic oligonucleotide
aaccaccgcctgcgacccgactcaatcggacattttga

SEQ ID NO: 5563 - DNA, 36 bp, Artificial Sequence
  Synthetic oligonucleotide
aacgccacagggacctggatatcgagcagaaacgta

SEQ ID NO: 5564 - DNA, 35 bp, Artificial Sequence
  Synthetic oligonucleotide
gacgcatgcccctcaacacacgcccgctttattaa

SEQ ID NO: 5565 - DNA, 37 bp, Artificial Sequence
  Synthetic oligonucleotide
gtggacgcaagaggaccaatgacctgtcagcaaatga

SEQ ID NO: 5566 - DNA, 38 bp, Artificial Sequence
  Synthetic oligonucleotide
atcgccacaacgacagctatagcacctcaggcatctga

SEQ ID NO: 5567 - DNA, 36 bp, Artificial Sequence
  Synthetic oligonucleotide
gacgccccatatgccgttttaaggtaaggctccgta

SEQ ID NO: 5568 - DNA, 36 bp, Artificial Sequence
  Synthetic oligonucleotide
gatgccggtgagagccaggtgatcgtcatgaactaa

SEQ ID NO: 5569 - DNA, 38 bp, Artificial Sequence
  Synthetic oligonucleotide
gtcgccgcagacccccgattagtcttaggctcctttga

SEQ ID NO: 5570 - DNA, 35 bp, Artificial Sequence
  Synthetic oligonucleotide
tgcctatcagggcgccaccaccaccgcggttcccc

SEQ ID NO: 5571 - DNA, 36 bp, Artificial Sequence
  Synthetic oligonucleotide
gaacgaacgtgagcggtgcatgctatttcgctccta

SEQ ID NO: 5572 - DNA, 38 bp, Artificial Sequence
  Synthetic oligonucleotide
gaccaacttagctgaaaggaggctgacgaaataggtga

SEQ ID NO: 5573 - DNA, 35 bp, Artificial Sequence
  Synthetic oligonucleotide
gacgtgccacggtttcatggttcaagcattttact

SEQ ID NO: 5574 - DNA, 38 bp, Artificial Sequence
  Synthetic oligonucleotide
acacgaggccaccgcgcatcgacttgcgttacacctga

SEQ ID NO: 5575 - DNA, 35 bp, Artificial Sequence
  Synthetic oligonucleotide
tatgcgggccgaccacttatcactttagccctttc

SEQ ID NO: 5576 - DNA, 36 bp, Artificial Sequence
  Synthetic oligonucleotide
gacacacccagcttctgcaccagtgcgtaacgtaga

SEQ ID NO: 5577 - DNA, 36 bp, Artificial Sequence
  Synthetic oligonucleotide
gacaccccagtggcaccccgtatcgcgttaccatga

SEQ ID NO: 5578 - DNA, 36 bp, Artificial Sequence
  Synthetic oligonucleotide
gatccgcgcaccatgcataccgtcacgtgagggcga

SEQ ID NO: 5579 - DNA, 38 bp, Artificial Sequence
  Synthetic oligonucleotide
gcccaggccgaagatgatgttcaccctcacgaaaatga

SEQ ID NO: 5580 - DNA, 36 bp, Artificial Sequence
  Synthetic oligonucleotide
tggacaacggggaagcatgtctaaagagcaggagaa

SEQ ID NO: 5581 - DNA, 36 bp, Artificial Sequence
  Synthetic oligonucleotide
gaccaatccctgcagtgtgtcgctttccattcctca

SEQ ID NO: 5582 - DNA, 38 bp, Artificial Sequence
  Synthetic oligonucleotide
gaccagcaggaacgacgccaatcgcctacacattctga

SEQ ID NO: 5583 - DNA, 36 bp, Artificial Sequence
  Synthetic oligonucleotide
ggtccatgtgcgcgaaggcttcagggtaccgaatga

SEQ ID NO: 5584 - DNA, 36 bp, Artificial Sequence
  Synthetic oligonucleotide
tgtgcaggtactgcttaacccggtgtcaatagggta

SEQ ID NO: 5585 - DNA, 36 bp, Artificial Sequence
  Synthetic oligonucleotide
accaccacatcagcgaggaattatgcccaccgaaga

SEQ ID NO: 5586 - DNA, 35 bp, Artificial Sequence
  Synthetic oligonucleotide
atgcgagcatcaccagcaccactaccaccactagt

SEQ ID NO: 5587 - DNA, 38 bp, Artificial Sequence
  Synthetic oligonucleotide
gacgacgcactagacttttaccgctgcttgttacctga

SEQ ID NO: 5588 - DNA, 37 bp, Artificial Sequence
  Synthetic oligonucleotide
gacaccaacgcctggttgtaatgatgactatccgtga

SEQ ID NO: 5589 - DNA, 35 bp, Artificial Sequence
  Synthetic oligonucleotide
gacaccctggtggcacgggctggtgactccttcgt

SEQ ID NO: 5590 - DNA, 37 bp, Artificial Sequence
  Synthetic oligonucleotide
gtgccaaagcagtgtgctcacttgtgctacgagttga

SEQ ID NO: 5591 - DNA, 35 bp, Artificial Sequence
  Synthetic oligonucleotide
gaagcgagtccgcataaccacttaagaacaggaga

SEQ ID NO: 5592 - DNA, 36 bp, Artificial Sequence
  Synthetic oligonucleotide
acacggaagggcggccagacaataatcagagtggga

SEQ ID NO: 5593 - DNA, 35 bp, Artificial Sequence
  Synthetic oligonucleotide
ctgcaacgacgcaataccctcattcggtcaagggt

SEQ ID NO: 5594 - DNA, 37 bp, Artificial Sequence
  Synthetic oligonucleotide
gaccacgcacagtatctcacactacatttctacacga

SEQ ID NO: 5595 - DNA, 36 bp, Artificial Sequence
  Synthetic oligonucleotide
gacgcatggagcggtgagggcgagaagcggctctaa

SEQ ID NO: 5596 - DNA, 35 bp, Artificial Sequence
  Synthetic oligonucleotide
gtccggagacaagcgttgcccatgtgtgttactcc

SEQ ID NO: 5597 - DNA, 35 bp, Artificial Sequence
  Synthetic oligonucleotide
gttgcctgcctttaaccccgtacagaacgcgaacc

SEQ ID NO: 5598 - DNA, 37 bp, Artificial Sequence
  Synthetic oligonucleotide
taccacccgcatgcgaagcaatcggcatttgtacgga

SEQ ID NO: 5599 - DNA, 37 bp, Artificial Sequence
  Synthetic oligonucleotide
tcacacccgtccctgcccctcgcgtcttgctgaaaga

SEQ ID NO: 5600 - DNA, 38 bp, Artificial Sequence
  Synthetic oligonucleotide
tacccgacccagttgcaccgaccccgcattgtttatga

SEQ ID NO: 5601 - DNA, 37 bp, Artificial Sequence
  Synthetic oligonucleotide
gaccgtcgtagcggtagagtccatagagatacggaga

SEQ ID NO: 5602 - DNA, 37 bp, Artificial Sequence
  Synthetic oligonucleotide
gacgaatggcggtgaggaagatggaaaggacgagtga

SEQ ID NO: 5603 - DNA, 37 bp, Artificial Sequence
  Synthetic oligonucleotide
gacgtaggaggttcggaggggtgtatggcgggccgga

SEQ ID NO: 5604 - DNA, 38 bp, Artificial Sequence
  Synthetic oligonucleotide
gagacggggtcggaaagtctggtacggtgaaagactga

SEQ ID NO: 5605 - DNA, 36 bp, Artificial Sequence
  Synthetic oligonucleotide
tcaacacccgtcacatcgcacgtaaattacttctac

SEQ ID NO: 5606 - DNA, 35 bp, Artificial Sequence
  Synthetic oligonucleotide
tccgggtggtgcttggggtgagaggcgggaactgt

SEQ ID NO: 5607 - DNA, 37 bp, Artificial Sequence
  Synthetic oligonucleotide
aaccaacgcagaacggaggaccagtacactcccttga

SEQ ID NO: 5608 - DNA, 38 bp, Artificial Sequence
  Synthetic oligonucleotide
gacgaaggcacgggccaagtacgaggacaggctgctga

SEQ ID NO: 5609 - DNA, 35 bp, Artificial Sequence
  Synthetic oligonucleotide
gacgatagtcaccgctctagcccaggataaggtct

SEQ ID NO: 5610 - DNA, 36 bp, Artificial Sequence
  Synthetic oligonucleotide
gcaacgctaagggataatcacctcgcctccgttcta

SEQ ID NO: 5611 - DNA, 36 bp, Artificial Sequence
  Synthetic oligonucleotide
gccatacacaggtgcacggacgttcacaaagctcca

SEQ ID NO: 5612 - DNA, 38 bp, Artificial Sequence
  Synthetic oligonucleotide
gacgcaccagaggcggtaggactgataccaattgttga

SEQ ID NO: 5613 - DNA, 38 bp, Artificial Sequence
  Synthetic oligonucleotide
gatgcagtcggggggtgagacgacgatatgtctgttga

SEQ ID NO: 5614 - DNA, 37 bp, Artificial Sequence
  Synthetic oligonucleotide
gatgcatcggtcgcaattataccggagaactgggaga

SEQ ID NO: 5615 - DNA, 37 bp, Artificial Sequence
  Synthetic oligonucleotide
gtccaccgtacatccgtcgagcctgggtaccttgtga

SEQ ID NO: 5616 - DNA, 36 bp, Artificial Sequence
  Synthetic oligonucleotide
gtgcacatcccaatgacgtcagcccaaatgattgga

SEQ ID NO: 5617 - DNA, 38 bp, Artificial Sequence
  Synthetic oligonucleotide
tgcgcaccacgagacatgcattcggatagccatcatga

SEQ ID NO: 5618 - DNA, 38 bp, Artificial Sequence
  Synthetic oligonucleotide
gacacggtaggatgattgggaccatccgatattgatga

SEQ ID NO: 5619 - DNA, 36 bp, Artificial Sequence
  Synthetic oligonucleotide
gagacacgcgcggaatgggcattactaccacgccaa

SEQ ID NO: 5620 - DNA, 38 bp, Artificial Sequence
  Synthetic oligonucleotide
gttgagtgcgaagatgagtggaagtattggtcgggtga

SEQ ID NO: 5621 - DNA, 35 bp, Artificial Sequence
  Synthetic oligonucleotide
gacgccgtaagcaggttgcattctccgccaactat

SEQ ID NO: 5622 - DNA, 38 bp, Artificial Sequence
  Synthetic oligonucleotide
taccacgcaaccctccgtcataggacacttagccttga

SEQ ID NO: 5623 - DNA, 37 bp, Artificial Sequence
  Synthetic oligonucleotide
taccccgccgacgccacggttagctgtcagtatccga

SEQ ID NO: 5624 - DNA, 36 bp, Artificial Sequence
  Synthetic oligonucleotide
tagtgcgcacaggatagactcatacgtccaagtaaa

SEQ ID NO: 5625 - DNA, 36 bp, Artificial Sequence
  Synthetic oligonucleotide
tccgcacgactagctgtcccaatgctacctctggaa

SEQ ID NO: 5626 - DNA, 37 bp, Artificial Sequence
  Synthetic oligonucleotide
tgcgaacgccgctcggaagggacacgtgctgcaccga

SEQ ID NO: 5627 - DNA, 35 bp, Artificial Sequence
  Synthetic oligonucleotide
accaccgcagtttgcagaaagtgcgtggttcttac

SEQ ID NO: 5628 - DNA, 37 bp, Artificial Sequence
  Synthetic oligonucleotide
accaccgccatgcttttaaacgtcaatcagctgtcga

SEQ ID NO: 5629 - DNA, 38 bp, Artificial Sequence
  Synthetic oligonucleotide
gcacacctcaaaggcagtatcgcaagtattgaatatga

SEQ ID NO: 5630 - DNA, 35 bp, Artificial Sequence
  Synthetic oligonucleotide
gccagagcccaaccccgcactagacaatccccccg

SEQ ID NO: 5631 - DNA, 38 bp, Artificial Sequence
  Synthetic oligonucleotide
gcccccaggccctgattgtatgtgaaagcccactttga

SEQ ID NO: 5632 - DNA, 38 bp, Artificial Sequence
  Synthetic oligonucleotide
ggacacctaggcgcatgcatacagtaccatgaaggtga

SEQ ID NO: 5633 - DNA, 36 bp, Artificial Sequence
  Synthetic oligonucleotide
tagtgctgcagtgggatctgagaagcggtaccagta

SEQ ID NO: 5634 - DNA, 37 bp, Artificial Sequence
  Synthetic oligonucleotide
aacacctgcatttcggcattcgggtcaagctctggga

SEQ ID NO: 5635 - DNA, 35 bp, Artificial Sequence
  Synthetic oligonucleotide
atcagccattccacggggaccgcccagcctgtttc

SEQ ID NO: 5636 - DNA, 37 bp, Artificial Sequence
  Synthetic oligonucleotide
gcaacacgacaggcgcacatgatgttctaatcataga

SEQ ID NO: 5637 - DNA, 36 bp, Artificial Sequence
  Synthetic oligonucleotide
gcagaagcgggcaagtaatacagataacaccaaacg

SEQ ID NO: 5638 - DNA, 36 bp, Artificial Sequence
  Synthetic oligonucleotide
gtgaccaacgacgtcttcgttcctaaagtctgctaa

SEQ ID NO: 5639 - DNA, 36 bp, Artificial Sequence
  Synthetic oligonucleotide
taacgcacggccgaacggaagttgactgcacctaca

SEQ ID NO: 5640 - DNA, 35 bp, Artificial Sequence
  Synthetic oligonucleotide
tcacactcaggcatatctcctactgaccccgaagc

SEQ ID NO: 5641 - DNA, 37 bp, Artificial Sequence
  Synthetic oligonucleotide
aaatgccagccgaagaatcctgcgatggctggttcga

SEQ ID NO: 5642 - DNA, 38 bp, Artificial Sequence
  Synthetic oligonucleotide
gacaacggcgcatgcataagagaaaagggtattattga

SEQ ID NO: 5643 - DNA, 35 bp, Artificial Sequence
  Synthetic oligonucleotide
gatagacacaggtactcatctgcccccttttatct

SEQ ID NO: 5644 - DNA, 36 bp, Artificial Sequence
  Synthetic oligonucleotide
tccacccacgacaccagcctgaccccgtaatcctga

SEQ ID NO: 5645 - DNA, 35 bp, Artificial Sequence
  Synthetic oligonucleotide
ccacatcgaaagccgagcatgttggcttgtttcat

SEQ ID NO: 5646 - DNA, 38 bp, Artificial Sequence
  Synthetic oligonucleotide
gacgaacaaaggcaggttgtcgcgaggccacgaggtga

SEQ ID NO: 5647 - DNA, 36 bp, Artificial Sequence
  Synthetic oligonucleotide
gccacctcatcctcccacaattatgacgtgtgaaca

SEQ ID NO: 5648 - DNA, 38 bp, Artificial Sequence
  Synthetic oligonucleotide
acgcacggggaaacagactgatgtgaaatggcaattga

SEQ ID NO: 5649 - DNA, 35 bp, Artificial Sequence
  Synthetic oligonucleotide
gaaccgccactctgtgttcgggagaccaatgagag

SEQ ID NO: 5650 - DNA, 35 bp, Artificial Sequence
  Synthetic oligonucleotide
tccgaagcaagacgttgacgcacgtgtaattacac

SEQ ID NO: 5651 - DNA, 37 bp, Artificial Sequence
  Synthetic oligonucleotide
aacgcgaacgagtcagaaccattacccaccactggga

SEQ ID NO: 5652 - DNA, 38 bp, Artificial Sequence
  Synthetic oligonucleotide
gacaacaagctgatctacccagtcgacgaggaggatga

SEQ ID NO: 5653 - DNA, 36 bp, Artificial Sequence
  Synthetic oligonucleotide
gacgcaggcacgcgaggacgagataggaggtcgaga

SEQ ID NO: 5654 - DNA, 35 bp, Artificial Sequence
  Synthetic oligonucleotide
gccgaaggcgctggatgtatcaggacgtatatggg

SEQ ID NO: 5655 - DNA, 35 bp, Artificial Sequence
  Synthetic oligonucleotide
gccgacccacgacttaattgctgacagtttacatc

SEQ ID NO: 5656 - DNA, 36 bp, Artificial Sequence
  Synthetic oligonucleotide
gctgacaccgtaatgtgatcgtttcgaccttgtgta

SEQ ID NO: 5657 - DNA, 35 bp, Artificial Sequence
  Synthetic oligonucleotide
acacacccagttcctgtcagcatttaagcctttag

SEQ ID NO: 5658 - DNA, 36 bp, Artificial Sequence
  Synthetic oligonucleotide
acatgcacggagccaatacaggagaagacattgcta

SEQ ID NO: 5659 - DNA, 37 bp, Artificial Sequence
  Synthetic oligonucleotide
gaccaggaacatgggcgtgggtaagactgaggaggga

SEQ ID NO: 5660 - DNA, 36 bp, Artificial Sequence
  Synthetic oligonucleotide
gacccacgcagggctttggctaccgctttctcctta

SEQ ID NO: 5661 - DNA, 35 bp, Artificial Sequence
  Synthetic oligonucleotide
gacgatggcggccccagcacccacattcggacagc

SEQ ID NO: 5662 - DNA, 35 bp, Artificial Sequence
  Synthetic oligonucleotide
gccactcagccatcctattatacgctccacaccga

SEQ ID NO: 5663 - DNA, 35 bp, Artificial Sequence
  Synthetic oligonucleotide
ggatcgccctgaccccgtgcgcccttcccccgacc

SEQ ID NO: 5664 - DNA, 36 bp, Artificial Sequence
  Synthetic oligonucleotide
tcacgcacaggttacgtgtagagcgttgctatggaa

SEQ ID NO: 5665 - DNA, 38 bp, Artificial Sequence
  Synthetic oligonucleotide
gacgaagagcgggggacggtcaaaagcggcaagactga

SEQ ID NO: 5666 - DNA, 35 bp, Artificial Sequence
  Synthetic oligonucleotide
tgacgccaacacgaacggtagtctctaaaaatcca

SEQ ID NO: 5667 - DNA, 36 bp, Artificial Sequence
  Synthetic oligonucleotide
catgcgcacgtgcagcagctaaggaaaaccgttgta

SEQ ID NO: 5668 - DNA, 36 bp, Artificial Sequence
  Synthetic oligonucleotide
gacacatcagtcaggctatgtgctcgagggtgtcga

SEQ ID NO: 5669 - DNA, 37 bp, Artificial Sequence
  Synthetic oligonucleotide
gcaatggataggtggtgagacgtcgcggggttctgga

SEQ ID NO: 5670 - DNA, 37 bp, Artificial Sequence
  Synthetic oligonucleotide
cgggacgcgtaggctcgtaccaatggctggtgtccga

SEQ ID NO: 5671 - DNA, 35 bp, Artificial Sequence
  Synthetic oligonucleotide
gtcacacacacgatatcttcgacaccaggaccgcc

SEQ ID NO: 5672 - DNA, 36 bp, Artificial Sequence
  Synthetic oligonucleotide
ttggaggaccactgcatctctgaccccgctatacaa

SEQ ID NO: 5673 - DNA, 35 bp, Artificial Sequence
  Synthetic oligonucleotide
acacgcatcggtaccagtaatacgaaagtacggta

SEQ ID NO: 5674 - DNA, 36 bp, Artificial Sequence
  Synthetic oligonucleotide
atgcccacggacaggatgtacacatcaaaggcgtaa

SEQ ID NO: 5675 - DNA, 35 bp, Artificial Sequence
  Synthetic oligonucleotide
gacggacgcaccaaagttctcaaggggctgacttg

SEQ ID NO: 5676 - DNA, 35 bp, Artificial Sequence
  Synthetic oligonucleotide
gcacaacgtacacagctctgcttctctcatttacc

SEQ ID NO: 5677 - DNA, 35 bp, Artificial Sequence
  Synthetic oligonucleotide
gcccatatcgccgttcgttgaacccctcgaaacat

SEQ ID NO: 5678 - DNA, 35 bp, Artificial Sequence
  Synthetic oligonucleotide
aacgcgcggtgcatgggtgagatctctttgttgcg

SEQ ID NO: 5679 - DNA, 36 bp, Artificial Sequence
  Synthetic oligonucleotide
acacaccgcaacccgatatatggacgtccacaggga

SEQ ID NO: 5680 - DNA, 35 bp, Artificial Sequence
  Synthetic oligonucleotide
gaccacgccaggggggaaagccacgtctgaaatga

SEQ ID NO: 5681 - DNA, 37 bp, Artificial Sequence
  Synthetic oligonucleotide
gacgactgcctacagtgtcgaacggatgacctgctga

SEQ ID NO: 5682 - DNA, 35 bp, Artificial Sequence
  Synthetic oligonucleotide
tcacagcgactaaacaccaccctgacagacacagg

SEQ ID NO: 5683 - DNA, 35 bp, Artificial Sequence
  Synthetic oligonucleotide
tgcgaccggtagggagaccccggtgtcctatgact

SEQ ID NO: 5684 - DNA, 35 bp, Artificial Sequence
  Synthetic oligonucleotide
ggtgccgcacgtcactctatttatcagtctacgtt

SEQ ID NO: 5685 - DNA, 36 bp, Artificial Sequence
  Synthetic oligonucleotide
aacacgactccacacgttgaagccatccatctcgaa

SEQ ID NO: 5686 - DNA, 36 bp, Artificial Sequence
  Synthetic oligonucleotide
aacgtacaccgctgccgttaaacccgcatttaccaa

SEQ ID NO: 5687 - DNA, 37 bp, Artificial Sequence
  Synthetic oligonucleotide
acaaccgcaagtcgaccagccttggagacacctggga

SEQ ID NO: 5688 - DNA, 38 bp, Artificial Sequence
  Synthetic oligonucleotide
acaccgacatgccacgcacaactaacaattcacattga

SEQ ID NO: 5689 - DNA, 36 bp, Artificial Sequence
  Synthetic oligonucleotide
atcgacgtgccctctgtcgttctgtctgaaacatca

SEQ ID NO: 5690 - DNA, 38 bp, Artificial Sequence
  Synthetic oligonucleotide
gatgacgcgcccgggtgcgttggagctttgtcccccga

SEQ ID NO: 5691 - DNA, 37 bp, Artificial Sequence
  Synthetic oligonucleotide
gccactcgccacatcatttcggctaacgactgccaga

SEQ ID NO: 5692 - DNA, 36 bp, Artificial Sequence
  Synthetic oligonucleotide
gccgcaaccactgaccccgagtatttcagaggctaa

SEQ ID NO: 5693 - DNA, 38 bp, Artificial Sequence
  Synthetic oligonucleotide
tagcacgcaatgcatcggtccgtcatttacattcgtga

SEQ ID NO: 5694 - DNA, 36 bp, Artificial Sequence
  Synthetic oligonucleotide
aacccgcaaccgctctgccgtaactcgaccccgaaa

SEQ ID NO: 5695 - DNA, 37 bp, Artificial Sequence
  Synthetic oligonucleotide
atcccagggtcgacattagggagggatcagggtacga

SEQ ID NO: 5696 - DNA, 37 bp, Artificial Sequence
  Synthetic oligonucleotide
gataccgtcacgtataaggatatcttcgagtggtcga

SEQ ID NO: 5697 - DNA, 38 bp, Artificial Sequence
  Synthetic oligonucleotide
gatccatctcgtacccactgaccccgtgacggccttga

SEQ ID NO: 5698 - DNA, 37 bp, Artificial Sequence
  Synthetic oligonucleotide
gcacagcacggcgaaaaaccgatgtggagttcactga

SEQ ID NO: 5699 - DNA, 38 bp, Artificial Sequence
  Synthetic oligonucleotide
accacacgcgaacggtagggtagctcatgtacatttga

SEQ ID NO: 5700 - DNA, 36 bp, Artificial Sequence
  Synthetic oligonucleotide
atcaacgccgggggaacgtcgacgccttaaagggta

SEQ ID NO: 5701 - DNA, 36 bp, Artificial Sequence
  Synthetic oligonucleotide
tgcatcagcaatgtaggtaggagcggatgcaacgta

SEQ ID NO: 5702 - DNA, 35 bp, Artificial Sequence
  Synthetic oligonucleotide
ttgaccactgccatcatcgtctctgtttctaccca

SEQ ID NO: 5703 - DNA, 35 bp, Artificial Sequence
  Synthetic oligonucleotide
acacccaccaccactactaagcgcgccaagtgagc

SEQ ID NO: 5704 - DNA, 35 bp, Artificial Sequence
  Synthetic oligonucleotide
cggactgagcgttaaagggctacacacgccttgtc

SEQ ID NO: 5705 - DNA, 36 bp, Artificial Sequence
  Synthetic oligonucleotide
gacacacttcggtgccaatgactgcgaaagaaatca

SEQ ID NO: 5706 - DNA, 38 bp, Artificial Sequence
  Synthetic oligonucleotide
gacgagcgcaatgacttacgaacacatactctgaatga

SEQ ID NO: 5707 - DNA, 35 bp, Artificial Sequence
  Synthetic oligonucleotide
gcccgacatggcattaagctccacgcgtccgattg

SEQ ID NO: 5708 - DNA, 37 bp, Artificial Sequence
  Synthetic oligonucleotide
tacatccgcggtaatgtcctacaacaggtacacaaga

SEQ ID NO: 5709 - DNA, 38 bp, Artificial Sequence
  Synthetic oligonucleotide
aaccaagcaagacgcgaaaaaggcggtcccccgagtga

SEQ ID NO: 5710 - DNA, 36 bp, Artificial Sequence
  Synthetic oligonucleotide
accgactgtatgcgtcgattttgaaatcggacaaca

SEQ ID NO: 5711 - DNA, 37 bp, Artificial Sequence
  Synthetic oligonucleotide
gacaacaccagattgcttctacagtagtagaatcgga

SEQ ID NO: 5712 - DNA, 36 bp, Artificial Sequence
  Synthetic oligonucleotide
gacgcgctggaataacaaccagagaagctacacaca

SEQ ID NO: 5713 - DNA, 35 bp, Artificial Sequence
  Synthetic oligonucleotide
gcccgtatccaacctctgaccccgctattttgttc

SEQ ID NO: 5714 - DNA, 35 bp, Artificial Sequence
  Synthetic oligonucleotide
tagcccccgtgatgggcggacggattctctcaacg

SEQ ID NO: 5715 - DNA, 38 bp, Artificial Sequence
  Synthetic oligonucleotide
tgacacccaccaagggttttgattacaactctcgctga

SEQ ID NO: 5716 - DNA, 36 bp, Artificial Sequence
  Synthetic oligonucleotide
atcccatgcagagctgtcaagtacacacaataggta

SEQ ID NO: 5717 - DNA, 38 bp, Artificial Sequence
  Synthetic oligonucleotide
gaccagccgggctgcactccgactaacgagactggtga

SEQ ID NO: 5718 - DNA, 36 bp, Artificial Sequence
  Synthetic oligonucleotide
gacgcgtgcggtcccacactcatataatacggtaca

SEQ ID NO: 5719 - DNA, 36 bp, Artificial Sequence
  Synthetic oligonucleotide
gggaccacaggctcagtacttgagaatcggccaaca

SEQ ID NO: 5720 - DNA, 36 bp, Artificial Sequence
  Synthetic oligonucleotide
accacgacatcccaatggagccccgtgagcgtgtca

SEQ ID NO: 5721 - DNA, 37 bp, Artificial Sequence
  Synthetic oligonucleotide
gatgccgcagaggagaacggtcggggaacagtactga

SEQ ID NO: 5722 - DNA, 37 bp, Artificial Sequence
  Synthetic oligonucleotide
gatgcgcctatgacctctcgtgaacctacattgtaga

SEQ ID NO: 5723 - DNA, 37 bp, Artificial Sequence
  Synthetic oligonucleotide
gcacaaccgcgggaacggaagtataggtcaaggtgga

SEQ ID NO: 5724 - DNA, 35 bp, Artificial Sequence
  Synthetic oligonucleotide
gccgagccagtgcgtggcaccagtcatgtgaggcc

SEQ ID NO: 5725 - DNA, 35 bp, Artificial Sequence
  Synthetic oligonucleotide
acagccggcctaccttttaacgtcaaggagtgtaa

SEQ ID NO: 5726 - DNA, 37 bp, Artificial Sequence
  Synthetic oligonucleotide
accatgccgccggggtgtagcacatatctcgcgtaga

SEQ ID NO: 5727 - DNA, 35 bp, Artificial Sequence
  Synthetic oligonucleotide
gcgatagcacgggaggtggccagcaacacgtcgac

SEQ ID NO: 5728 - DNA, 35 bp, Artificial Sequence
  Synthetic oligonucleotide
gcgtaccgcctgccacttccacttggtaatcaccc

SEQ ID NO: 5729 - DNA, 36 bp, Artificial Sequence
  Synthetic oligonucleotide
tacgtgcgcagaaggggttacgaataagaccgaaca

SEQ ID NO: 5730 - DNA, 37 bp, Artificial Sequence
  Synthetic oligonucleotide
tgcactgaccccgcaccttacgttaacgacgccccaa

SEQ ID NO: 5731 - DNA, 35 bp, Artificial Sequence
  Synthetic oligonucleotide
accaccccagacgcgcgatcagcagatcgtcatgc

SEQ ID NO: 5732 - DNA, 35 bp, Artificial Sequence
  Synthetic oligonucleotide
gacgagcggggtgtgggttgtggaaactttatggg

SEQ ID NO: 5733 - DNA, 35 bp, Artificial Sequence
  Synthetic oligonucleotide
gcacgaccatatccgtcctaccaccaaacatgtac

SEQ ID NO: 5734 - DNA, 35 bp, Artificial Sequence
  Synthetic oligonucleotide
taaccgcacaccgtctgggctaggaagcaagtact

SEQ ID NO: 5735 - DNA, 35 bp, Artificial Sequence
  Synthetic oligonucleotide
tagacggccccaaccccggcgtgaagcttgtaatt

SEQ ID NO: 5736 - DNA, 35 bp, Artificial Sequence
  Synthetic oligonucleotide
tgacgcacgtagatcatcttggtatctgtcgggtt

SEQ ID NO: 5737 - DNA, 35 bp, Artificial Sequence
  Synthetic oligonucleotide
atgcgggcagtaacaactccgtatagatgcacgtt

SEQ ID NO: 5738 - DNA, 37 bp, Artificial Sequence
  Synthetic oligonucleotide
attcacgccggtcggcctcccgtcgattgtcgaggca

SEQ ID NO: 5739 - DNA, 37 bp, Artificial Sequence
  Synthetic oligonucleotide
gacacacccagtggtaggtaaagtagcctgtttctga

SEQ ID NO: 5740 - DNA, 36 bp, Artificial Sequence
  Synthetic oligonucleotide
ggaccagccatagtaagagagagttctcacacgtta

SEQ ID NO: 5741 - DNA, 37 bp, Artificial Sequence
  Synthetic oligonucleotide
tcaacgccctaccgaccccgcaggacaggcattttga

SEQ ID NO: 5742 - DNA, 36 bp, Artificial Sequence
  Synthetic oligonucleotide
aacaacagaacacgaacgtaaacagcgatctgtcca

SEQ ID NO: 5743 - DNA, 36 bp, Artificial Sequence
  Synthetic oligonucleotide
accccactgcgccagccacgaggacatcccgttcta

SEQ ID NO: 5744 - DNA, 36 bp, Artificial Sequence
  Synthetic oligonucleotide
gacagtgcacccaaagtgtaatgtgttacaggttga

SEQ ID NO: 5745 - DNA, 37 bp, Artificial Sequence
  Synthetic oligonucleotide
tcacgcacaggtgatgttgaccatgtcctacacgtta

SEQ ID NO: 5746 - DNA, 36 bp, Artificial Sequence
  Synthetic oligonucleotide
tcacgcaccgacatagccgcaccgcaataaccacca

SEQ ID NO: 5747 - DNA, 35 bp, Artificial Sequence
  Synthetic oligonucleotide
tccacgaccccatccattcgtaagaaacgttaagg

SEQ ID NO: 5748 - DNA, 36 bp, Artificial Sequence
  Synthetic oligonucleotide
agtgtgcgacctccattatgccacctgaccccgaaa

SEQ ID NO: 5749 - DNA, 36 bp, Artificial Sequence
  Synthetic oligonucleotide
atcgcgcaaggccaatgttaactctgtcacagacta

SEQ ID NO: 5750 - DNA, 37 bp, Artificial Sequence
  Synthetic oligonucleotide
gacaatgcattcacgtgcagacgtaccgccattcaga

SEQ ID NO: 5751 - DNA, 37 bp, Artificial Sequence
  Synthetic oligonucleotide
gtgcaacgcaccataggacttactggtcaacatctga

SEQ ID NO: 5752 - DNA, 37 bp, Artificial Sequence
  Synthetic oligonucleotide
tcagcccgagcacataagaaacaaatacttttgttga

SEQ ID NO: 5753 - DNA, 38 bp, Artificial Sequence
  Synthetic oligonucleotide
tgtgccacatcgcgttacggtcatgacgtagtaattga

SEQ ID NO: 5754 - DNA, 37 bp, Artificial Sequence
  Synthetic oligonucleotide
ttcgacacaccgttgttccagagcccagcagaggtga

SEQ ID NO: 5755 - DNA, 37 bp, Artificial Sequence
  Synthetic oligonucleotide
agacacgcgcagagaacgagacgtgaaattggaagga

SEQ ID NO: 5756 - DNA, 35 bp, Artificial Sequence
  Synthetic oligonucleotide
gacaaccacaatcccacgtcgctatggctgtatgc

SEQ ID NO: 5757 - DNA, 35 bp, Artificial Sequence
  Synthetic oligonucleotide
gacaacgtggtgcgcccatccccagatctcgcgta

SEQ ID NO: 5758 - DNA, 35 bp, Artificial Sequence
  Synthetic oligonucleotide
gcacacatacgtcgattcccgtgcatctggacgga

SEQ ID NO: 5759 - DNA, 36 bp, Artificial Sequence
  Synthetic oligonucleotide
gccgacgacggtaaggcacggagtagcgaccatgta

SEQ ID NO: 5760 - DNA, 37 bp, Artificial Sequence
  Synthetic oligonucleotide
tcccaaacgcgaatagtttttagtgtcgacagagtga

SEQ ID NO: 5761 - DNA, 38 bp, Artificial Sequence
  Synthetic oligonucleotide
tcccaacgtgcggagcggtggacgtaatccgttgatga

SEQ ID NO: 5762 - DNA, 36 bp, Artificial Sequence
  Synthetic oligonucleotide
tcacgccccagcataacggacccgccctatctgtta

SEQ ID NO: 5763 - DNA, 35 bp, Artificial Sequence
  Synthetic oligonucleotide
aacccaaccccgactccttcgaccccgtccagtgc

SEQ ID NO: 5764 - DNA, 35 bp, Artificial Sequence
  Synthetic oligonucleotide
cgaaaacagggcccaaacgtcaaaagtctcgtttt

SEQ ID NO: 5765 - DNA, 35 bp, Artificial Sequence
  Synthetic oligonucleotide
gcaagccacggagacgtaccgttcaatttttgcta

SEQ ID NO: 5766 - DNA, 37 bp, Artificial Sequence
  Synthetic oligonucleotide
tcaacccgccgactgtgcgaaacaggaaatgccagga

SEQ ID NO: 5767 - DNA, 36 bp, Artificial Sequence
  Synthetic oligonucleotide
aatgcacaagcagaatagagcagtgctaggtgacaa

SEQ ID NO: 5768 - DNA, 35 bp, Artificial Sequence
  Synthetic oligonucleotide
acaccacctacagttgttgtaaggcatggcatctg

SEQ ID NO: 5769 - DNA, 35 bp, Artificial Sequence
  Synthetic oligonucleotide
atgccaccgaacgactagactgtatgcttttgggt

SEQ ID NO: 5770 - DNA, 35 bp, Artificial Sequence
  Synthetic oligonucleotide
gacgcccgtcctcatcgcagtcccaactttccatc

SEQ ID NO: 5771 - DNA, 35 bp, Artificial Sequence
  Synthetic oligonucleotide
gcacaccatccactgaccccgttagccctcttgaa

SEQ ID NO: 5772 - DNA, 36 bp, Artificial Sequence
  Synthetic oligonucleotide
gtgccacaacggtgcgtatctgaaacgtattgtcaa

SEQ ID NO: 5773 - DNA, 37 bp, Artificial Sequence
  Synthetic oligonucleotide
atgccaagccattgtacgaccacgctgtcgaccctga

SEQ ID NO: 5774 - DNA, 37 bp, Artificial Sequence
  Synthetic oligonucleotide
gaccaacgccgacgacaacttgcatcctaaggtggta

SEQ ID NO: 5775 - DNA, 37 bp, Artificial Sequence
  Synthetic oligonucleotide
gacgacgggcaagagtgttaagttccttccgttgtga

SEQ ID NO: 5776 - DNA, 38 bp, Artificial Sequence
  Synthetic oligonucleotide
gcgatcacacactgcccatattctgtcactctttctga

SEQ ID NO: 5777 - DNA, 38 bp, Artificial Sequence
  Synthetic oligonucleotide
ggggccgaagtgcaccacgatcctcttgtcggtactga

SEQ ID NO: 5778 - DNA, 36 bp, Artificial Sequence
  Synthetic oligonucleotide
tcacccccgttaacagccccgcctcacccgcacgta

SEQ ID NO: 5779 - DNA, 37 bp, Artificial Sequence
  Synthetic oligonucleotide
tgcaaccccagagctggaacgcatcagatcgcctaga

SEQ ID NO: 5780 - DNA, 35 bp, Artificial Sequence
  Synthetic oligonucleotide
aacatgccaggcgccgacttccttaacaattttcc

SEQ ID NO: 5781 - DNA, 36 bp, Artificial Sequence
  Synthetic oligonucleotide
acatcccaacgacgcccgcaccgaacatgttcctta

SEQ ID NO: 5782 - DNA, 35 bp, Artificial Sequence
  Synthetic oligonucleotide
tgcgaagcaagttttaaaccgcgccactctacacg

SEQ ID NO: 5783 - DNA, 36 bp, Artificial Sequence
  Synthetic oligonucleotide
tatccgcacaccaacgagtcgggtgcaatcctggca

SEQ ID NO: 5784 - DNA, 36 bp, Artificial Sequence
  Synthetic oligonucleotide
aacataccgccatcactcgtacgtccgcgaggtcta

SEQ ID NO: 5785 - DNA, 37 bp, Artificial Sequence
  Synthetic oligonucleotide
acacacgacatcaccggttgtcagatacacataacga

SEQ ID NO: 5786 - DNA, 38 bp, Artificial Sequence
  Synthetic oligonucleotide
agcgcaccatcctgtatcgaagacgtctaggtgtctga

SEQ ID NO: 5787 - DNA, 36 bp, Artificial Sequence
  Synthetic oligonucleotide
gcgcaagcacgggctgtctgttaaccgatgtgggga

SEQ ID NO: 5788 - DNA, 36 bp, Artificial Sequence
  Synthetic oligonucleotide
gtgcgcacacacctaaagaggcataacgtcccgtga

SEQ ID NO: 5789 - DNA, 35 bp, Artificial Sequence
  Synthetic oligonucleotide
tcaccgtgctgcagaaggtaacgttcgctcatagc

SEQ ID NO: 5790 - DNA, 35 bp, Artificial Sequence
  Synthetic oligonucleotide
tgtcacccggaagacccccagaaagtcgatagtca

SEQ ID NO: 5791 - DNA, 36 bp, Artificial Sequence
  Synthetic oligonucleotide
acagtcaggctacaaattttaccgaccccgaaacaa

SEQ ID NO: 5792 - DNA, 36 bp, Artificial Sequence
  Synthetic oligonucleotide
accggggccggacagaatcgtgggtgtcgtaccgaa

SEQ ID NO: 5793 - DNA, 35 bp, Artificial Sequence
  Synthetic oligonucleotide
atcgcgccactggtcttgatgaacagagatcggat

SEQ ID NO: 5794 - DNA, 36 bp, Artificial Sequence
  Synthetic oligonucleotide
gaccacgaagaaactccgacacgggcaatgcagcca

SEQ ID NO: 5795 - DNA, 36 bp, Artificial Sequence
  Synthetic oligonucleotide
gcacccgccaaagatcgaccagtaacgacgccacta

SEQ ID NO: 5796 - DNA, 35 bp, Artificial Sequence
  Synthetic oligonucleotide
tagcacagcaaggggtctgagtcaggttgaaaggg

SEQ ID NO: 5797 - DNA, 37 bp, Artificial Sequence
  Synthetic oligonucleotide
ccaccaccaggacgtgcggtggagataagttgcaaga

SEQ ID NO: 5798 - DNA, 38 bp, Artificial Sequence
  Synthetic oligonucleotide
cgacgcgcagggaagtgattaagtgatattcgtgttga

SEQ ID NO: 5799 - DNA, 36 bp, Artificial Sequence
  Synthetic oligonucleotide
gaacacctcgcaatcgtgtaccaggacctgcttgca

SEQ ID NO: 5800 - DNA, 36 bp, Artificial Sequence
  Synthetic oligonucleotide
gagagcaccacgaatgggaagcacttagatgtgaaa

SEQ ID NO: 5801 - DNA, 35 bp, Artificial Sequence
  Synthetic oligonucleotide
gccaacatcaacatctacacaccgcttataaaccg

SEQ ID NO: 5802 - DNA, 36 bp, Artificial Sequence
  Synthetic oligonucleotide
tcaaccgcctcacacaaagaacttccgccacacgta

SEQ ID NO: 5803 - DNA, 35 bp, Artificial Sequence
  Synthetic oligonucleotide
aaccccgccagtgcctgctccagtactcacccacc

SEQ ID NO: 5804 - DNA, 38 bp, Artificial Sequence
  Synthetic oligonucleotide
aacctagccaacagtagtcgccataaggcaagacatga

SEQ ID NO: 5805 - DNA, 35 bp, Artificial Sequence
  Synthetic oligonucleotide
acacgctcacactcggtgatcgaatcagctcgccg

SEQ ID NO: 5806 - DNA, 35 bp, Artificial Sequence
  Synthetic oligonucleotide
gacccatcagcaggatagaacaggacacatatgag

SEQ ID NO: 5807 - DNA, 36 bp, Artificial Sequence
  Synthetic oligonucleotide
taccacactcgcagtcctcataaggctacatctcta

SEQ ID NO: 5808 - DNA, 36 bp, Artificial Sequence
  Synthetic oligonucleotide
tacgtcgcacccgtagttctctatcatcatacccaa

SEQ ID NO: 5809 - DNA, 36 bp, Artificial Sequence
  Synthetic oligonucleotide
acacgccggagagcatatatcttactgcaaatgaga

SEQ ID NO: 5810 - DNA, 35 bp, Artificial Sequence
  Synthetic oligonucleotide
gaccacagcatctgatctgattgcgttatatgccc

SEQ ID NO: 5811 - DNA, 38 bp, Artificial Sequence
  Synthetic oligonucleotide
gcaaacgctgaagatgtgcgcgcagtaaacttggatga

SEQ ID NO: 5812 - DNA, 35 bp, Artificial Sequence
  Synthetic oligonucleotide
gtggtccacagtcgatccacaacgacatgcgttcc

SEQ ID NO: 5813 - DNA, 36 bp, Artificial Sequence
  Synthetic oligonucleotide
tgagctagccacaggcggacaaccacatgtttatca

SEQ ID NO: 5814 - DNA, 36 bp, Artificial Sequence
  Synthetic oligonucleotide
gacaccgtagcgcgagagtccacatgtatcgggata

SEQ ID NO: 5815 - DNA, 36 bp, Artificial Sequence
  Synthetic oligonucleotide
tcacgcaagcagaggacgggtctggcttacacagga

SEQ ID NO: 5816 - DNA, 38 bp, Artificial Sequence
  Synthetic oligonucleotide
tccacatgcgcacatgtttaagtcctcacacggtataa

SEQ ID NO: 5817 - DNA, 36 bp, Artificial Sequence
  Synthetic oligonucleotide
tgcccaaccccggagacgactgagacccaacgtaca

SEQ ID NO: 5818 - DNA, 36 bp, Artificial Sequence
  Synthetic oligonucleotide
tgcgaagctcccaaaacatgccttatctgcgaggca

SEQ ID NO: 5819 - DNA, 37 bp, Artificial Sequence
  Synthetic oligonucleotide
acatgccacaggggccgacactttcgtacttggtaga

SEQ ID NO: 5820 - DNA, 35 bp, Artificial Sequence
  Synthetic oligonucleotide
aacacgcctcgcacctaagctttagtacgcatttc

SEQ ID NO: 5821 - DNA, 38 bp, Artificial Sequence
  Synthetic oligonucleotide
gaccagccacacgaatcggtctggaacacgacttctga

SEQ ID NO: 5822 - DNA, 36 bp, Artificial Sequence
  Synthetic oligonucleotide
gtcaacgcactcatagtcctcctgttgctcaacaaa

SEQ ID NO: 5823 - DNA, 35 bp, Artificial Sequence
  Synthetic oligonucleotide
tcacaaggccaacggtatctcatgactggtggtta

SEQ ID NO: 5824 - DNA, 36 bp, Artificial Sequence
  Synthetic oligonucleotide
tcataaaccgcaactgagcactaggacggtgacgga

SEQ ID NO: 5825 - DNA, 35 bp, Artificial Sequence
  Synthetic oligonucleotide
tccgccagtcggtcgatgttagaaggacactagcc

SEQ ID NO: 5826 - DNA, 36 bp, Artificial Sequence
  Synthetic oligonucleotide
aaacactccgcaccgaccccgcgaggctgaccccga

SEQ ID NO: 5827 - DNA, 36 bp, Artificial Sequence
  Synthetic oligonucleotide
acagtgcaaagcaggcaatcctgaatctctctcata

SEQ ID NO: 5828 - DNA, 35 bp, Artificial Sequence
  Synthetic oligonucleotide
gacggtccaagctaattcaacgtcctcaagagcca

SEQ ID NO: 5829 - DNA, 37 bp, Artificial Sequence
  Synthetic oligonucleotide
gcaacgcaaagcagtaaatgacacactcgatcaccaa

SEQ ID NO: 5830 - DNA, 36 bp, Artificial Sequence
  Synthetic oligonucleotide
gcccaggtcgccaacaccgtacttcctgctccatca

SEQ ID NO: 5831 - DNA, 38 bp, Artificial Sequence
  Synthetic oligonucleotide
ggaccgcacagtgatcgaaaagcatcaatactccgtga

SEQ ID NO: 5832 - DNA, 38 bp, Artificial Sequence
  Synthetic oligonucleotide
gacgaaagcgcaacatccgtaatgccgctcccgcatga

SEQ ID NO: 5833 - DNA, 37 bp, Artificial Sequence
  Synthetic oligonucleotide
ggaccggtatggagagtgcgcaaaggaacagtactga

SEQ ID NO: 5834 - DNA, 38 bp, Artificial Sequence
  Synthetic oligonucleotide
tcccaccagcacgagattgctaaccacgtctaaactga

SEQ ID NO: 5835 - DNA, 35 bp, Artificial Sequence
  Synthetic oligonucleotide
tgaagcgcaatcagtctctgaccccgaccaaaacc

SEQ ID NO: 5836 - DNA, 36 bp, Artificial Sequence
  Synthetic oligonucleotide
tgaccgtgaggtccttagtggcgagtaactttccca

SEQ ID NO: 5837 - DNA, 36 bp, Artificial Sequence
  Synthetic oligonucleotide
gaacattccagaccccgcttcctatcctcgtcgcga

SEQ ID NO: 5838 - DNA, 35 bp, Artificial Sequence
  Synthetic oligonucleotide
gcaacgacagtcgggtgtgagttaactgacgatat

SEQ ID NO: 5839 - DNA, 35 bp, Artificial Sequence
  Synthetic oligonucleotide
tcacgaacaggagatggtcgtgttgtgttgggaca

SEQ ID NO: 5840 - DNA, 37 bp, Artificial Sequence
  Synthetic oligonucleotide
tatgccacgatcccaatctagcgcctattgtctttga

SEQ ID NO: 5841 - DNA, 38 bp, Artificial Sequence
  Synthetic oligonucleotide
gcaacgccacggtgtacatggaaccagtaggtcgttga

SEQ ID NO: 5842 - DNA, 36 bp, Artificial Sequence
  Synthetic oligonucleotide
tatacgccagcccgaccacactgccctgaccccgaa

SEQ ID NO: 5843 - DNA, 36 bp, Artificial Sequence
  Synthetic oligonucleotide
acaccgccacagcagtcttatcactggttgcaccca

SEQ ID NO: 5844 - DNA, 34 bp, Artificial Sequence
  Synthetic oligonucleotide
caacggctgctaagtcaggacaagggaggcacat

SEQ ID NO: 5845 - DNA, 37 bp, Artificial Sequence
  Synthetic oligonucleotide
gaccaacgatcatgctaaaatacttccacattcggga

SEQ ID NO: 5846 - DNA, 36 bp, Artificial Sequence
  Synthetic oligonucleotide
gccaattccgcccctactctgaccccgtataaacga

SEQ ID NO: 5847 - DNA, 36 bp, Artificial Sequence
  Synthetic oligonucleotide
gccgagtcgggggatataagccgaatgaggatccta

SEQ ID NO: 5848 - DNA, 35 bp, Artificial Sequence
  Synthetic oligonucleotide
gcgcactacactacccgctattagttcactgttgg

SEQ ID NO: 5849 - DNA, 37 bp, Artificial Sequence
  Synthetic oligonucleotide
gtcgacgcaaaaagatctaggccagtcagtaggaaga

SEQ ID NO: 5850 - DNA, 36 bp, Artificial Sequence
  Synthetic oligonucleotide
gacgacgactaggtacgtcgttttaacacttggcta

SEQ ID NO: 5851 - DNA, 35 bp, Artificial Sequence
  Synthetic oligonucleotide
gcacaggggcgacgtatctggcatggtattcttat

SEQ ID NO: 5852 - DNA, 36 bp, Artificial Sequence
  Synthetic oligonucleotide
tcccctaccacccgcttgaaccgactccgaccccga

SEQ ID NO: 5853 - DNA, 35 bp, Artificial Sequence
  Synthetic oligonucleotide
tgaaaagccgccgtcgacattacgaacttaacgct

SEQ ID NO: 5854 - DNA, 37 bp, Artificial Sequence
  Synthetic oligonucleotide
accacacgtagcctcgtcgctaagttgaaagaaggga

SEQ ID NO: 5855 - DNA, 38 bp, Artificial Sequence
  Synthetic oligonucleotide
gacccgcagggcacggtgctgcgtaccagcatgcatga

SEQ ID NO: 5856 - DNA, 37 bp, Artificial Sequence
  Synthetic oligonucleotide
gccaatcgaaagatacgtcacgaattcgagctatgga

SEQ ID NO: 5857 - DNA, 37 bp, Artificial Sequence
  Synthetic oligonucleotide
tagtggcgaaacggacgagagcgaaaagcgatgctga

SEQ ID NO: 5858 - DNA, 37 bp, Artificial Sequence
  Synthetic oligonucleotide
atgctcagacccccgataggacaattttagctttgga

SEQ ID NO: 5859 - DNA, 35 bp, Artificial Sequence
  Synthetic oligonucleotide
gacccaatgagtgctattttcatccttcacgacgt

SEQ ID NO: 5860 - DNA, 35 bp, Artificial Sequence
  Synthetic oligonucleotide
gacgagcgcacagagcgtacggtaaccccagacca

SEQ ID NO: 5861 - DNA, 38 bp, Artificial Sequence
  Synthetic oligonucleotide
gagcctgatgacctactgaccccgccgccaaccactga

SEQ ID NO: 5862 - DNA, 36 bp, Artificial Sequence
  Synthetic oligonucleotide
tgaacgcgcacacacttgttaggtcgatcggtacca

SEQ ID NO: 5863 - DNA, 38 bp, Artificial Sequence
  Synthetic oligonucleotide
gccacacacgctgccaaaagactatgtgtcttgcctga

SEQ ID NO: 5864 - DNA, 38 bp, Artificial Sequence
  Synthetic oligonucleotide
gtcacccgcgtaatgcaagtccataacgatacaactga

SEQ ID NO: 5865 - DNA, 36 bp, Artificial Sequence
  Synthetic oligonucleotide
gtgaccgcgagttgcccacatccgcagaaacatgga

SEQ ID NO: 5866 - DNA, 36 bp, Artificial Sequence
  Synthetic oligonucleotide
gtgccacggggtcagtcgaactagggcacaatcgta

SEQ ID NO: 5867 - DNA, 36 bp, Artificial Sequence
  Synthetic oligonucleotide
tatgccaaacgttagctgcgtaaaaacgtggtggca

SEQ ID NO: 5868 - DNA, 37 bp, Artificial Sequence
  Synthetic oligonucleotide
acacgcgcgcattacccaggctgtaaccaagactcga

SEQ ID NO: 5869 - DNA, 35 bp, Artificial Sequence
  Synthetic oligonucleotide
atgccactgcaggggtacaggtagggcaacacgta

SEQ ID NO: 5870 - DNA, 35 bp, Artificial Sequence
  Synthetic oligonucleotide
gacgactgccagtccacacacgtaaaggctcacat

SEQ ID NO: 5871 - DNA, 37 bp, Artificial Sequence
  Synthetic oligonucleotide
gccaacagaactggttaacaacttcctagtattagga

SEQ ID NO: 5872 - DNA, 38 bp, Artificial Sequence
  Synthetic oligonucleotide
tacagcccaatcgtcgccagtacacgatacatggttga

SEQ ID NO: 5873 - DNA, 37 bp, Artificial Sequence
  Synthetic oligonucleotide
tccaaagcgcaggtcgtgggaagatcatcataggcga

SEQ ID NO: 5874 - DNA, 35 bp, Artificial Sequence
  Synthetic oligonucleotide
acaccaggcctgttgtatacagcttcgttcgaact

SEQ ID NO: 5875 - DNA, 35 bp, Artificial Sequence
  Synthetic oligonucleotide
gacgatgcagacgtgtgaccctatttttatttcgc

SEQ ID NO: 5876 - DNA, 35 bp, Artificial Sequence
  Synthetic oligonucleotide
gcaccggccacaccctaagtagcacgaacaacacg

SEQ ID NO: 5877 - DNA, 37 bp, Artificial Sequence
  Synthetic oligonucleotide
ggacaaagccagccggtacgcaagagacgtaatttga

SEQ ID NO: 5878 - DNA, 36 bp, Artificial Sequence
  Synthetic oligonucleotide
tacacaccgaacaacaaggataagggtgatctagaa

SEQ ID NO: 5879 - DNA, 35 bp, Artificial Sequence
  Synthetic oligonucleotide
tacccacacaacagaacgtaaactctcgactcctc

SEQ ID NO: 5880 - DNA, 38 bp, Artificial Sequence
  Synthetic oligonucleotide
aacacaagtcgaaatgcgtgagacgagtttgatcgtga

SEQ ID NO: 5881 - DNA, 35 bp, Artificial Sequence
  Synthetic oligonucleotide
gacaccttcaggatgcagtgctactaacccttctg

SEQ ID NO: 5882 - DNA, 37 bp, Artificial Sequence
  Synthetic oligonucleotide
gactcccacacgtctatacttgaacctaaagtcttga

SEQ ID NO: 5883 - DNA, 35 bp, Artificial Sequence
  Synthetic oligonucleotide
gagcaacaccgcagattcacagaggaaacccattg

SEQ ID NO: 5884 - DNA, 36 bp, Artificial Sequence
  Synthetic oligonucleotide
gtgagagccgtccacacttcacattgactccatgca

SEQ ID NO: 5885 - DNA, 38 bp, Artificial Sequence
  Synthetic oligonucleotide
tgaatcgcgcacatgttacaatcatagatcctcggtga

SEQ ID NO: 5886 - DNA, 37 bp, Artificial Sequence
  Synthetic oligonucleotide
aactgcaccggcaccactgttacctaataccccacga

SEQ ID NO: 5887 - DNA, 37 bp, Artificial Sequence
  Synthetic oligonucleotide
acaccgcactgctattcgtgacgtacaaagtcattga

SEQ ID NO: 5888 - DNA, 35 bp, Artificial Sequence
  Synthetic oligonucleotide
gacccacgaactgatagcccatatccacattaatt

SEQ ID NO: 5889 - DNA, 37 bp, Artificial Sequence
  Synthetic oligonucleotide
gcacgcttcttctggtatctagatgtcaacgtgttga

SEQ ID NO: 5890 - DNA, 36 bp, Artificial Sequence
  Synthetic oligonucleotide
gccaggggccgtttcgtcagttcatgccacccagaa

SEQ ID NO: 5891 - DNA, 38 bp, Artificial Sequence
  Synthetic oligonucleotide
gtggactgccgactatacctggctttcatgcgtcgtga

SEQ ID NO: 5892 - DNA, 35 bp, Artificial Sequence
  Synthetic oligonucleotide
tagctcccaagcacatctggcatcacgttctatca

SEQ ID NO: 5893 - DNA, 38 bp, Artificial Sequence
  Synthetic oligonucleotide
tgagacgcgaaagtgcgtagcattagacatgttcatga

SEQ ID NO: 5894 - DNA, 37 bp, Artificial Sequence
  Synthetic oligonucleotide
acaccgacccatcccgtcctcttgagcagtctctcga

SEQ ID NO: 5895 - DNA, 36 bp, Artificial Sequence
  Synthetic oligonucleotide
acacgcacacaatcaaaaacaagagcttgtcatgga

SEQ ID NO: 5896 - DNA, 35 bp, Artificial Sequence
  Synthetic oligonucleotide
gtggatgatcacacctgaccccgatccaaataacc

SEQ ID NO: 5897 - DNA, 36 bp, Artificial Sequence
  Synthetic oligonucleotide
tacaccctgcccactgaccccgaccacttgttgcta

SEQ ID NO: 5898 - DNA, 36 bp, Artificial Sequence
  Synthetic oligonucleotide
tcgaccgcaaaggcttgcgaaacgaccctggtgtca

SEQ ID NO: 5899 - DNA, 35 bp, Artificial Sequence
  Synthetic oligonucleotide
tactgcccgacgtcccaacgtacggcgcctgactc

SEQ ID NO: 5900 - DNA, 35 bp, Artificial Sequence
  Synthetic oligonucleotide
tagccatcccaatgcctcccgagtcacccgcaaca

SEQ ID NO: 5901 - DNA, 38 bp, Artificial Sequence
  Synthetic oligonucleotide
acacgcaaccaatgcccctaatgaagacgacacggtga

SEQ ID NO: 5902 - DNA, 35 bp, Artificial Sequence
  Synthetic oligonucleotide
accagtacgggtcaacctagttacacaacacttct

SEQ ID NO: 5903 - DNA, 35 bp, Artificial Sequence
  Synthetic oligonucleotide
gacatgcggtgcatattgttaacgcgatctacacc

SEQ ID NO: 5904 - DNA, 35 bp, Artificial Sequence
  Synthetic oligonucleotide
tgcgaaacatcatccggagtatgtggctaatgtcg

SEQ ID NO: 5905 - DNA, 38 bp, Artificial Sequence
  Synthetic oligonucleotide
tgtgcccagccatgtcgacgtaccatcattgcggttga

SEQ ID NO: 5906 - DNA, 38 bp, Artificial Sequence
  Synthetic oligonucleotide
gacaaggccgagttagcacgggcgattaagagtaatga

SEQ ID NO: 5907 - DNA, 38 bp, Artificial Sequence
  Synthetic oligonucleotide
gacaccgggggggttgggcgaaactatactgctagtga

SEQ ID NO: 5908 - DNA, 37 bp, Artificial Sequence
  Synthetic oligonucleotide
gacgccccgcatggttaacgcattgatactgcgacga

SEQ ID NO: 5909 - DNA, 36 bp, Artificial Sequence
  Synthetic oligonucleotide
gccacgaagggggacgtacgtcattggaatctcgga

SEQ ID NO: 5910 - DNA, 38 bp, Artificial Sequence
  Synthetic oligonucleotide
tagtgccccacccagaccgtcaccacatacaaggatga

SEQ ID NO: 5911 - DNA, 36 bp, Artificial Sequence
  Synthetic oligonucleotide
gaccaccgatcaaaggcgctaagggtgtccatcaga

SEQ ID NO: 5912 - DNA, 36 bp, Artificial Sequence
  Synthetic oligonucleotide
gcaacggaccaccaatatggggtaatggtaacgtta

SEQ ID NO: 5913 - DNA, 35 bp, Artificial Sequence
  Synthetic oligonucleotide
gccatcagggcgcggacggcagtcgactgatagtc

SEQ ID NO: 5914 - DNA, 35 bp, Artificial Sequence
  Synthetic oligonucleotide
gcgctaccccgcattactcattaagccgaccccga

SEQ ID NO: 5915 - DNA, 35 bp, Artificial Sequence
  Synthetic oligonucleotide
taacacaacctgcacgcacagcggaccgtcgttgc

SEQ ID NO: 5916 - DNA, 36 bp, Artificial Sequence
  Synthetic oligonucleotide
taccgccatacctcattagttcacctgaccccgcta

SEQ ID NO: 5917 - DNA, 35 bp, Artificial Sequence
  Synthetic oligonucleotide
tacgcgccaaagcgtaacgagttctcgccgttggt

SEQ ID NO: 5918 - DNA, 38 bp, Artificial Sequence
  Synthetic oligonucleotide
aaccgcaacatggttcaccggtcattgggatgacctga

SEQ ID NO: 5919 - DNA, 37 bp, Artificial Sequence
  Synthetic oligonucleotide
acaaccgcatgcctgatctatcagcaataccaggaga

SEQ ID NO: 5920 - DNA, 36 bp, Artificial Sequence
  Synthetic oligonucleotide
atgcgcaagcagacgaaagttaggatcccgttcaca

SEQ ID NO: 5921 - DNA, 35 bp, Artificial Sequence
  Synthetic oligonucleotide
gaccgcagtctgcctatggacaacattagcactgg

SEQ ID NO: 5922 - DNA, 36 bp, Artificial Sequence
  Synthetic oligonucleotide
gccaccgcaaggttcctccccagagatgacatcgta

SEQ ID NO: 5923 - DNA, 35 bp, Artificial Sequence
  Synthetic oligonucleotide
ggtgaacgcaccaaccttgtggtgatgacacgggc

SEQ ID NO: 5924 - DNA, 36 bp, Artificial Sequence
  Synthetic oligonucleotide
gtgggcgcaacaagtatccctggagacagcatgtta

SEQ ID NO: 5925 - DNA, 34 bp, Artificial Sequence
  Synthetic oligonucleotide
accaaccgcgccagcggaggcttaacgaggactg

SEQ ID NO: 5926 - DNA, 36 bp, Artificial Sequence
  Synthetic oligonucleotide
gacgcactagcggatcgtttctcagccctcgcaata

SEQ ID NO: 5927 - DNA, 37 bp, Artificial Sequence
  Synthetic oligonucleotide
gagaccatgagccgatatcgatcagtgacgtatctga

SEQ ID NO: 5928 - DNA, 35 bp, Artificial Sequence
  Synthetic oligonucleotide
ggtcaaccgcacgcatcacctacatccttcccggt

SEQ ID NO: 5929 - DNA, 35 bp, Artificial Sequence
  Synthetic oligonucleotide
aactgccacggtcggtcatcaatacaagcctattt

SEQ ID NO: 5930 - DNA, 36 bp, Artificial Sequence
  Synthetic oligonucleotide
acacgccggtcagtgttttgtataatgtactgcgaa

SEQ ID NO: 5931 - DNA, 38 bp, Artificial Sequence
  Synthetic oligonucleotide
atgccatcaacagagtaacggaggaagagactatgtga

SEQ ID NO: 5932 - DNA, 37 bp, Artificial Sequence
  Synthetic oligonucleotide
gacaccagcacatggcgtgaacatatgtcttggagga

SEQ ID NO: 5933 - DNA, 36 bp, Artificial Sequence
  Synthetic oligonucleotide
gacgctcagcggcacgtctattgttcactctaagta

SEQ ID NO: 5934 - DNA, 35 bp, Artificial Sequence
  Synthetic oligonucleotide
ggaccacagggagctccaatgcaggcacccatgtc

SEQ ID NO: 5935 - DNA, 35 bp, Artificial Sequence
  Synthetic oligonucleotide
ggtccaagacgggccgagagatattacaagaacta

SEQ ID NO: 5936 - DNA, 35 bp, Artificial Sequence
  Synthetic oligonucleotide
gtcacgcctacagggggtaggacgagaaaatgtgg

SEQ ID NO: 5937 - DNA, 35 bp, Artificial Sequence
  Synthetic oligonucleotide
tacaccaccacatctacggagccacgcaagagtcg

SEQ ID NO: 5938 - DNA, 35 bp, Artificial Sequence
  Synthetic oligonucleotide
tactgaccccgaaacctgcctgaccccgtccactg

SEQ ID NO: 5939 - DNA, 35 bp, Artificial Sequence
  Synthetic oligonucleotide
tccacggtccatccgcgatatccggtaggaccaat

SEQ ID NO: 5940 - DNA, 35 bp, Artificial Sequence
  Synthetic oligonucleotide
tgacgggtaggacatgggagatagcgcgattccag

SEQ ID NO: 5941 - DNA, 37 bp, Artificial Sequence
  Synthetic oligonucleotide
gcacccgcaaagtcgacatttaaaggccatgcaagga

SEQ ID NO: 5942 - DNA, 36 bp, Artificial Sequence
  Synthetic oligonucleotide
ggcccgcatagcgcggagtcacgtacgaggcagaga

SEQ ID NO: 5943 - DNA, 35 bp, Artificial Sequence
  Synthetic oligonucleotide
tcacgtgcggctcacaaaaacgcgctccatgctgc

SEQ ID NO: 5944 - DNA, 36 bp, Artificial Sequence
  Synthetic oligonucleotide
acatcagtcccggctgatagtcactgttgattttaa

SEQ ID NO: 5945 - DNA, 36 bp, Artificial Sequence
  Synthetic oligonucleotide
acccacatcggcccaccgtttcaagcaccgttctga

SEQ ID NO: 5946 - DNA, 35 bp, Artificial Sequence
  Synthetic oligonucleotide
gacaagacccgtcaaaagttaacacgtcaatgagt

SEQ ID NO: 5947 - DNA, 35 bp, Artificial Sequence
  Synthetic oligonucleotide
gacacccagacaatgtgaccccagtgacattgctt

SEQ ID NO: 5948 - DNA, 38 bp, Artificial Sequence
  Synthetic oligonucleotide
gcgagaaccgtagggaatgttgacacccatcgtagtga

SEQ ID NO: 5949 - DNA, 37 bp, Artificial Sequence
  Synthetic oligonucleotide
gtccaccccgtagctgcgtcgcccccacaccccgtga

SEQ ID NO: 5950 - DNA, 35 bp, Artificial Sequence
  Synthetic oligonucleotide
tcacgccacaccctacgaacaggtcaggagatcac

SEQ ID NO: 5951 - DNA, 36 bp, Artificial Sequence
  Synthetic oligonucleotide
tcagacgcaagacggttgcagtagggacgtccggta

SEQ ID NO: 5952 - DNA, 36 bp, Artificial Sequence
  Synthetic oligonucleotide
aaccaaccgaacattgcgcacagtagcagatcacca

SEQ ID NO: 5953 - DNA, 37 bp, Artificial Sequence
  Synthetic oligonucleotide
gcaaatgcgccgggtggtgggtaatgggatcccggga

SEQ ID NO: 5954 - DNA, 35 bp, Artificial Sequence
  Synthetic oligonucleotide
gcaacatgcatacacctatcttgaccgactgatac

SEQ ID NO: 5955 - DNA, 37 bp, Artificial Sequence
  Synthetic oligonucleotide
gttgcgcaaccgttttctccgacgaccataatctaga

SEQ ID NO: 5956 - DNA, 35 bp, Artificial Sequence
  Synthetic oligonucleotide
gacgacgctactgctgaaaccgaaccattcaattc

SEQ ID NO: 5957 - DNA, 37 bp, Artificial Sequence
  Synthetic oligonucleotide
gatgcgctgcagttagcatggcttaggatcctggaga

SEQ ID NO: 5958 - DNA, 37 bp, Artificial Sequence
  Synthetic oligonucleotide
gccgaccaggctcctctctgataactaagctgtggtg

SEQ ID NO: 5959 - DNA, 35 bp, Artificial Sequence
  Synthetic oligonucleotide
acacccgtccgaaatgcagttactatatggtacaa

SEQ ID NO: 5960 - DNA, 35 bp, Artificial Sequence
  Synthetic oligonucleotide
agcgcccgcaactcaccccaactgatcggcgaatg

SEQ ID NO: 5961 - DNA, 35 bp, Artificial Sequence
  Synthetic oligonucleotide
tacgactccgaccccgactcctatgcaccctgagc

SEQ ID NO: 5962 - DNA, 36 bp, Artificial Sequence
  Synthetic oligonucleotide
tgacgaggcgacccaggggtagattaagggcgatta

SEQ ID NO: 5963 - DNA, 38 bp, Artificial Sequence
  Synthetic oligonucleotide
gacgcgagtggcaacttcgatgacacgtactcatttga

SEQ ID NO: 5964 - DNA, 37 bp, Artificial Sequence
  Synthetic oligonucleotide
gacggagccgtaaggtgacatgggggttatggtggga

SEQ ID NO: 5965 - DNA, 35 bp, Artificial Sequence
  Synthetic oligonucleotide
gatgcacccacactttaacccaaaccatctagacc

SEQ ID NO: 5966 - DNA, 37 bp, Artificial Sequence
  Synthetic oligonucleotide
gatgcgtgcgcatcatattgtaaccttcttcagtcga

SEQ ID NO: 5967 - DNA, 36 bp, Artificial Sequence
  Synthetic oligonucleotide
gccaacgaactgccaagcgcaaccggttgtgacgaa

SEQ ID NO: 5968 - DNA, 37 bp, Artificial Sequence
  Synthetic oligonucleotide
gtgccaaccccctaactgcatacttagtcctgcccga

SEQ ID NO: 5969 - DNA, 35 bp, Artificial Sequence
  Synthetic oligonucleotide
gtgcgtagcgaatggcgccataatttgcgttaacg

SEQ ID NO: 5970 - DNA, 37 bp, Artificial Sequence
  Synthetic oligonucleotide
tacgtgcgtgcaacagtgcgtcgataacagggatgga

SEQ ID NO: 5971 - DNA, 35 bp, Artificial Sequence
  Synthetic oligonucleotide
tcaacacgcagacactgacgccctcgaacccaccc

SEQ ID NO: 5972 - DNA, 38 bp, Artificial Sequence
  Synthetic oligonucleotide
tcaagcacaccgaccactggtgtcagttcaacaagtga

SEQ ID NO: 5973 - DNA, 37 bp, Artificial Sequence
  Synthetic oligonucleotide
tgaaccgaggaagttgccacggtgtatgatgacacga

SEQ ID NO: 5974 - DNA, 35 bp, Artificial Sequence
  Synthetic oligonucleotide
tgagcctggtacatcgctgacgccctcgagttgtg

SEQ ID NO: 5975 - DNA, 35 bp, Artificial Sequence
  Synthetic oligonucleotide
acacacacgtcgacccgatggatcaaggactatga

SEQ ID NO: 5976 - DNA, 37 bp, Artificial Sequence
  Synthetic oligonucleotide
gaagcccagtcgtgttcgttcttccctaaacgcggga

SEQ ID NO: 5977 - DNA, 37 bp, Artificial Sequence
  Synthetic oligonucleotide
gccaacggggagggcggaacaacccatcttgaaagga

SEQ ID NO: 5978 - DNA, 37 bp, Artificial Sequence
  Synthetic oligonucleotide
ttaccaccccctcatgccacaccggaccacttgccga

SEQ ID NO: 5979 - DNA, 37 bp, Artificial Sequence
  Synthetic oligonucleotide
acatacgccgagtaacgcgggatagcagcaaggccga

SEQ ID NO: 5980 - DNA, 38 bp, Artificial Sequence
  Synthetic oligonucleotide
acatgcacccgacggtactatagttggacggtacctga

SEQ ID NO: 5981 - DNA, 36 bp, Artificial Sequence
  Synthetic oligonucleotide
ccagaacgttgagtgcggtaccttcaaacgtcccta

SEQ ID NO: 5982 - DNA, 36 bp, Artificial Sequence
  Synthetic oligonucleotide
gatggtggtggtgggcgagggaggtggtcgcgtatt

SEQ ID NO: 5983 - DNA, 37 bp, Artificial Sequence
  Synthetic oligonucleotide
gccgacccagaaggactgacagagaaggtgccgagga

SEQ ID NO: 5984 - DNA, 35 bp, Artificial Sequence
  Synthetic oligonucleotide
tgaacaacgccgactggtcttgggtccattttcca

SEQ ID NO: 5985 - DNA, 35 bp, Artificial Sequence
  Synthetic oligonucleotide
acacgcaccgtggacgtaaagccttgccatctctc

SEQ ID NO: 5986 - DNA, 36 bp, Artificial Sequence
  Synthetic oligonucleotide
gacacgcccccgtcgtcacggacctctccaaaatta

SEQ ID NO: 5987 - DNA, 37 bp, Artificial Sequence
  Synthetic oligonucleotide
gcaaacgtagcgacagacccccacagcgaatttggaa

SEQ ID NO: 5988 - DNA, 37 bp, Artificial Sequence
  Synthetic oligonucleotide
tacccgacaaatccgcgtagaaagatctaaccgtcga

SEQ ID NO: 5989 - DNA, 38 bp, Artificial Sequence
  Synthetic oligonucleotide
tacgaaaggcacgtgacagccccaatgcagacatatga

SEQ ID NO: 5990 - DNA, 38 bp, Artificial Sequence
  Synthetic oligonucleotide
tgtagccgacccgctcggacagcttctaagccccggga

SEQ ID NO: 5991 - DNA, 35 bp, Artificial Sequence
  Synthetic oligonucleotide
ttcgagctcgcagtcactactacatgtccccccct

SEQ ID NO: 5992 - DNA, 36 bp, Artificial Sequence
  Synthetic oligonucleotide
agtacgcaggagtactacaaggagctatctccttaa

SEQ ID NO: 5993 - DNA, 35 bp, Artificial Sequence
  Synthetic oligonucleotide
tacgcgggtgcatgccgttccataattttcgcgcc

SEQ ID NO: 5994 - DNA, 37 bp, Artificial Sequence
  Synthetic oligonucleotide
acaccgagctgacgtgctctcttggacatgctcaaga

SEQ ID NO: 5995 - DNA, 36 bp, Artificial Sequence
  Synthetic oligonucleotide
gaatgccactgcaggctgtacaatgactcggtcaca

SEQ ID NO: 5996 - DNA, 38 bp, Artificial Sequence
  Synthetic oligonucleotide
gatgcaacgcggacattgtggaataacgagcaggttga

SEQ ID NO: 5997 - DNA, 38 bp, Artificial Sequence
  Synthetic oligonucleotide
gcacgagggggaaaatgtgaattatgagattcagttga

SEQ ID NO: 5998 - DNA, 35 bp, Artificial Sequence
  Synthetic oligonucleotide
ggtgcgaagacagtaagagggacagacgtatcaat

SEQ ID NO: 5999 - DNA, 35 bp, Artificial Sequence
  Synthetic oligonucleotide
tcagacagagtcggacccccacaggatagttaatt

SEQ ID NO: 6000 - DNA, 37 bp, Artificial Sequence
  Synthetic oligonucleotide
aatgcacgaagggaaacgcgtcatctcagagtcttga

SEQ ID NO: 6001 - DNA, 36 bp, Artificial Sequence
  Synthetic oligonucleotide
acccgaacgaccggggagacaaaggtggatcaaaaa

SEQ ID NO: 6002 - DNA, 35 bp, Artificial Sequence
  Synthetic oligonucleotide
caaacggaggctgcaccttgcttggacacatataa

SEQ ID NO: 6003 - DNA, 36 bp, Artificial Sequence
  Synthetic oligonucleotide
gaccagccaggctgtcactgaagtcgtggatacaca

SEQ ID NO: 6004 - DNA, 38 bp, Artificial Sequence
  Synthetic oligonucleotide
gcacgatccgtagtccacgtcgcccgacgccgagttga

SEQ ID NO: 6005 - DNA, 36 bp, Artificial Sequence
  Synthetic oligonucleotide
tgaccaggagcacgggccaggtgaacgtaacttcga

SEQ ID NO: 6006 - DNA, 35 bp, Artificial Sequence
  Synthetic oligonucleotide
tgccatgcgcacggattacaggtaccatgagcata

SEQ ID NO: 6007 - DNA, 37 bp, Artificial Sequence
  Synthetic oligonucleotide
ttgaccccgcctccctggaccccgttgtgctcgatga

SEQ ID NO: 6008 - DNA, 36 bp, Artificial Sequence
  Synthetic oligonucleotide
aacacccaccggcgataacggaacatcgctacacaa

SEQ ID NO: 6009 - DNA, 35 bp, Artificial Sequence
  Synthetic oligonucleotide
acccgaccccgaagcaagttgtaggtgtgttcctc

SEQ ID NO: 6010 - DNA, 36 bp, Artificial Sequence
  Synthetic oligonucleotide
atcacgcaggaagatgcaagcggcaaaaaacaggga

SEQ ID NO: 6011 - DNA, 35 bp, Artificial Sequence
  Synthetic oligonucleotide
gactgcccaagcaaagatagtacaccgagtggtgg

SEQ ID NO: 6012 - DNA, 36 bp, Artificial Sequence
  Synthetic oligonucleotide
gtcaaccgcgacgatcccaatcgccgtatggtagta

SEQ ID NO: 6013 - DNA, 38 bp, Artificial Sequence
  Synthetic oligonucleotide
gccgacgaagtgcatgatttcactaggcatatcgttga

SEQ ID NO: 6014 - DNA, 35 bp, Artificial Sequence
  Synthetic oligonucleotide
gctgcaacccatttcaccgtgactcccaaggcacc

SEQ ID NO: 6015 - DNA, 35 bp, Artificial Sequence
  Synthetic oligonucleotide
ggagaagccgaagcggcattgcctcgtggtttaag

SEQ ID NO: 6016 - DNA, 37 bp, Artificial Sequence
  Synthetic oligonucleotide
gatgccagcacgggaccttatacctgatcagtagaga

SEQ ID NO: 6017 - DNA, 37 bp, Artificial Sequence
  Synthetic oligonucleotide
tacacgaacaggtcattaggaccaccctagtgcagga

SEQ ID NO: 6018 - DNA, 36 bp, Artificial Sequence
  Synthetic oligonucleotide
tcgaacgtcgcagcccatgtaggttatctctcggga

SEQ ID NO: 6019 - DNA, 36 bp, Artificial Sequence
  Synthetic oligonucleotide
aacgcacgggtgcaggaatgtagaactgctatttga

SEQ ID NO: 6020 - DNA, 37 bp, Artificial Sequence
  Synthetic oligonucleotide
acacacgcaggcaaagggtagtctacagtgacgttga

SEQ ID NO: 6021 - DNA, 38 bp, Artificial Sequence
  Synthetic oligonucleotide
accgcgcacacggaaacttgaaggcaaaggttatttga

SEQ ID NO: 6022 - DNA, 35 bp, Artificial Sequence
  Synthetic oligonucleotide
gcgatcaggcgcgggagttaggcggatcgcacgtg

SEQ ID NO: 6023 - DNA, 36 bp, Artificial Sequence
  Synthetic oligonucleotide
gcgatgccgcaatgcctgtaagcgtgagagccacga

SEQ ID NO: 6024 - DNA, 37 bp, Artificial Sequence
  Synthetic oligonucleotide
tgaactgcgcacccacaaatagaccacccttcagaga

SEQ ID NO: 6025 - DNA, 35 bp, Artificial Sequence
  Synthetic oligonucleotide
tgcggtagcaacgactcgaatcagcatagaccgac

SEQ ID NO: 6026 - DNA, 37 bp, Artificial Sequence
  Synthetic oligonucleotide
ttgggcgcaacgtaaggttccaggctggttgggtgga

SEQ ID NO: 6027 - DNA, 37 bp, Artificial Sequence
  Synthetic oligonucleotide
aacaaccgacgggtgtagtgccgtaactagaagatga

SEQ ID NO: 6028 - DNA, 37 bp, Artificial Sequence
  Synthetic oligonucleotide
acccacaacgccgatgctactcttccgagcacattga

SEQ ID NO: 6029 - DNA, 36 bp, Artificial Sequence
  Synthetic oligonucleotide
acctgcatgccatggaacgtaaaagggcttgggaga

SEQ ID NO: 6030 - DNA, 37 bp, Artificial Sequence
  Synthetic oligonucleotide
acgtgccgaatgagcctattatcttcactgaccccga

SEQ ID NO: 6031 - DNA, 37 bp, Artificial Sequence
  Synthetic oligonucleotide
gatgccaaacggtgtctcaggctcacgaggcgaaaga

SEQ ID NO: 6032 - DNA, 35 bp, Artificial Sequence
  Synthetic oligonucleotide
gtccctgcagggaaccgtctacaatccaggcccac

SEQ ID NO: 6033 - DNA, 36 bp, Artificial Sequence
  Synthetic oligonucleotide
gtcgcaacgcggcacgggacaacgtcttaactatgt

SEQ ID NO: 6034 - DNA, 37 bp, Artificial Sequence
  Synthetic oligonucleotide
tagtgacgccatgagaacagagggacacacaggcaga

SEQ ID NO: 6035 - DNA, 35 bp, Artificial Sequence
  Synthetic oligonucleotide
accccgaaaaaccagaccccgacctatgagatcaa

SEQ ID NO: 6036 - DNA, 35 bp, Artificial Sequence
  Synthetic oligonucleotide
atcatgcaccacatctgtacctcttcgagtaaggg

SEQ ID NO: 6037 - DNA, 36 bp, Artificial Sequence
  Synthetic oligonucleotide
atgcacagacaccgattcaggagggtcggtccacga

SEQ ID NO: 6038 - DNA, 35 bp, Artificial Sequence
  Synthetic oligonucleotide
gacacaggcctgctatttacaccacgtttatcact

SEQ ID NO: 6039 - DNA, 34 bp, Artificial Sequence
  Synthetic oligonucleotide
tacgacgcagacggggctgtctgtctctaagtac

SEQ ID NO: 6040 - DNA, 37 bp, Artificial Sequence
  Synthetic oligonucleotide
gaccgcatggaaacgtacgcaggcttctaatctaaga

SEQ ID NO: 6041 - DNA, 38 bp, Artificial Sequence
  Synthetic oligonucleotide
gacgcgtgccacacgatcccaatcgccgcatcccctga

SEQ ID NO: 6042 - DNA, 37 bp, Artificial Sequence
  Synthetic oligonucleotide
gatgcctcagtaagcccatgatctgtatcgatgatga

SEQ ID NO: 6043 - DNA, 35 bp, Artificial Sequence
  Synthetic oligonucleotide
acaccgatacgcgcggttcacgatgcctttcaaca

SEQ ID NO: 6044 - DNA, 35 bp, Artificial Sequence
  Synthetic oligonucleotide
atcctgcaccggcccaccgcgtgaaaattgtttgg

SEQ ID NO: 6045 - DNA, 35 bp, Artificial Sequence
  Synthetic oligonucleotide
gaccatggcacgacttacagacgaggatcgcgttg

SEQ ID NO: 6046 - DNA, 35 bp, Artificial Sequence
  Synthetic oligonucleotide
gactacgcaatgtacaactcaggtcccatatgcac

SEQ ID NO: 6047 - DNA, 36 bp, Artificial Sequence
  Synthetic oligonucleotide
ggactgcaccgatatgcaatgtcctgtataaccgca

SEQ ID NO: 6048 - DNA, 35 bp, Artificial Sequence
  Synthetic oligonucleotide
acaccgcaccacagattgccctttaccaccgccga

SEQ ID NO: 6049 - DNA, 35 bp, Artificial Sequence
  Synthetic oligonucleotide
gacaccgaaactgtacggatccgaatcgatcaaat

SEQ ID NO: 6050 - DNA, 35 bp, Artificial Sequence
  Synthetic oligonucleotide
gacgcgggagcggcacaccaatctcacttctactt

SEQ ID NO: 6051 - DNA, 37 bp, Artificial Sequence
  Synthetic oligonucleotide
aacacccagagcgtatcaaacatgttggagtatttga

SEQ ID NO: 6052 - DNA, 38 bp, Artificial Sequence
  Synthetic oligonucleotide
gcaacaagcaaggggtatcatgtcggtactgtttctga

SEQ ID NO: 6053 - DNA, 35 bp, Artificial Sequence
  Synthetic oligonucleotide
gcacgacagggggcaggagaagtcggttcggttta

SEQ ID NO: 6054 - DNA, 35 bp, Artificial Sequence
  Synthetic oligonucleotide
gccaagagagtggcacggacagcgtaaatcggtat

SEQ ID NO: 6055 - DNA, 38 bp, Artificial Sequence
  Synthetic oligonucleotide
gcgccgggcgcattagtaggccggtacccgtcgattga

SEQ ID NO: 6056 - DNA, 37 bp, Artificial Sequence
  Synthetic oligonucleotide
gtggcccatgcacccgaccgtgtcctatatctcggga

SEQ ID NO: 6057 - DNA, 38 bp, Artificial Sequence
  Synthetic oligonucleotide
tcaagggcagacccccagctgttcgtactcccgtgtga

SEQ ID NO: 6058 - DNA, 36 bp, Artificial Sequence
  Synthetic oligonucleotide
tgccccgatactgaccccgctcccgtaaacagctag

SEQ ID NO: 6059 - DNA, 35 bp, Artificial Sequence
  Synthetic oligonucleotide
attcgcgccggtaatggaggacatcgtctgaatcg

SEQ ID NO: 6060 - DNA, 36 bp, Artificial Sequence
  Synthetic oligonucleotide
gccaagtgcgtgaatcatcggactgcgacgtgaata

SEQ ID NO: 6061 - DNA, 36 bp, Artificial Sequence
  Synthetic oligonucleotide
gtcgcagatgcggggccataaaaccagggacacaaa

SEQ ID NO: 6062 - DNA, 37 bp, Artificial Sequence
  Synthetic oligonucleotide
taccactcccccaggagtaaaaaggcagtagcgtgga

SEQ ID NO: 6063 - DNA, 35 bp, Artificial Sequence
  Synthetic oligonucleotide
tcagacggtaccacacacgtaaggcgttcgcagga

SEQ ID NO: 6064 - DNA, 35 bp, Artificial Sequence
  Synthetic oligonucleotide
tgaccacagcagtcataagctgggaagacgactat

SEQ ID NO: 6065 - DNA, 36 bp, Artificial Sequence
  Synthetic oligonucleotide
tgacgcaggggctgcaacatcataagtttcgatcta

SEQ ID NO: 6066 - DNA, 36 bp, Artificial Sequence
  Synthetic oligonucleotide
aagccacaacccgtgtatgaatccgaagaatgagga

SEQ ID NO: 6067 - DNA, 36 bp, Artificial Sequence
  Synthetic oligonucleotide
gacgagggaagctcgtcgatactcagcatacgtgaa

SEQ ID NO: 6068 - DNA, 38 bp, Artificial Sequence
  Synthetic oligonucleotide
gcacatccgaccgtaatccacagaacggtaatcgttga

SEQ ID NO: 6069 - DNA, 37 bp, Artificial Sequence
  Synthetic oligonucleotide
gcacgccgggaaggttgcggactatataaaacgttga

SEQ ID NO: 6070 - DNA, 35 bp, Artificial Sequence
  Synthetic oligonucleotide
gcatgctacagccagaggtactttccgcgatgtag

SEQ ID NO: 6071 - DNA, 36 bp, Artificial Sequence
  Synthetic oligonucleotide
gccacagcaagttacccagaaggccctcgagaacga

SEQ ID NO: 6072 - DNA, 35 bp, Artificial Sequence
  Synthetic oligonucleotide
gccgaaccggacgcgatggtgtaaacaccataccc

SEQ ID NO: 6073 - DNA, 35 bp, Artificial Sequence
  Synthetic oligonucleotide
gtgcgggcaacgtatcaatttcatgcatccacttg

SEQ ID NO: 6074 - DNA, 36 bp, Artificial Sequence
  Synthetic oligonucleotide
tgatgcggacatgccgtgcacacgttctatggcaga

SEQ ID NO: 6075 - DNA, 38 bp, Artificial Sequence
  Synthetic oligonucleotide
aacgcgctgagggatgtgacatggacgggggcacgtga

SEQ ID NO: 6076 - DNA, 35 bp, Artificial Sequence
  Synthetic oligonucleotide
acaccacctcaccttcccacgtccatcggtttacg

SEQ ID NO: 6077 - DNA, 35 bp, Artificial Sequence
  Synthetic oligonucleotide
accaccgaaccagacttaactgtttagctgtatag

SEQ ID NO: 6078 - DNA, 36 bp, Artificial Sequence
  Synthetic oligonucleotide
actgaccccgcatccttgacagttgatactggggaa

SEQ ID NO: 6079 - DNA, 38 bp, Artificial Sequence
  Synthetic oligonucleotide
agccgaggaggcggagctaaagcagacgagaagattga

SEQ ID NO: 6080 - DNA, 38 bp, Artificial Sequence
  Synthetic oligonucleotide
gacacgagtcatgaacgtgaaacatcggtcccgtctga

SEQ ID NO: 6081 - DNA, 35 bp, Artificial Sequence
  Synthetic oligonucleotide
gacacgatagggagtagagagctgccactccgact

SEQ ID NO: 6082 - DNA, 35 bp, Artificial Sequence
  Synthetic oligonucleotide
gacactgcgcaccggaacccatcgatggtcatgcc

SEQ ID NO: 6083 - DNA, 37 bp, Artificial Sequence
  Synthetic oligonucleotide
gacggacaaggccaccgctaaaaagactaactactga

SEQ ID NO: 6084 - DNA, 37 bp, Artificial Sequence
  Synthetic oligonucleotide
gcgtagccactgacccccagataggcgcccagggcga

SEQ ID NO: 6085 - DNA, 37 bp, Artificial Sequence
  Synthetic oligonucleotide
atcacgtgcccacaccgacccggacggtccttcatga

SEQ ID NO: 6086 - DNA, 36 bp, Artificial Sequence
  Synthetic oligonucleotide
gacaaggtcggtcggtacgtatttgggcggtaacca

SEQ ID NO: 6087 - DNA, 36 bp, Artificial Sequence
  Synthetic oligonucleotide
gacacgatccagattagccaaggattatgctgacga

SEQ ID NO: 6088 - DNA, 38 bp, Artificial Sequence
  Synthetic oligonucleotide
gactggagggcgcaacgaaacagtagggcagactgtga

SEQ ID NO: 6089 - DNA, 36 bp, Artificial Sequence
  Synthetic oligonucleotide
gccacgacacgggtgccagcaacgactgttccccaa

SEQ ID NO: 6090 - DNA, 36 bp, Artificial Sequence
  Synthetic oligonucleotide
tccaccccaccaaatgagaaagcgtcttcgttcgca

SEQ ID NO: 6091 - DNA, 38 bp, Artificial Sequence
  Synthetic oligonucleotide
acaacccaagtcctagttaattacgataggcaaagtga

SEQ ID NO: 6092 - DNA, 35 bp, Artificial Sequence
  Synthetic oligonucleotide
gacacggtgcagtgaggtgatatgcgtgaaagagg

SEQ ID NO: 6093 - DNA, 36 bp, Artificial Sequence
  Synthetic oligonucleotide
gaccagccagggacaagggagggggggtgttaccta

SEQ ID NO: 6094 - DNA, 35 bp, Artificial Sequence
  Synthetic oligonucleotide
tacgcgggctgtcgggttaagtagaccagccttta

SEQ ID NO: 6095 - DNA, 35 bp, Artificial Sequence
  Synthetic oligonucleotide
tccgacccgtcgtgccctacaatggtccccagacg

SEQ ID NO: 6096 - DNA, 37 bp, Artificial Sequence
  Synthetic oligonucleotide
tgcgggccaataggtgaggttacgtcttggttagaga

SEQ ID NO: 6097 - DNA, 35 bp, Artificial Sequence
  Synthetic oligonucleotide
acatacctgcaggaggtagccgaatcgaattcact

SEQ ID NO: 6098 - DNA, 35 bp, Artificial Sequence
  Synthetic oligonucleotide
gacacgccgatcggtctcccgcgcgtacgtgtgga

SEQ ID NO: 6099 - DNA, 38 bp, Artificial Sequence
  Synthetic oligonucleotide
gaccaaccacctggagtaatcgggatcagttattgtga

SEQ ID NO: 6100 - DNA, 35 bp, Artificial Sequence
  Synthetic oligonucleotide
gccactgtccgactcgatatgattcgttctttaga

SEQ ID NO: 6101 - DNA, 38 bp, Artificial Sequence
  Synthetic oligonucleotide
tcaacgcgaccgaacatcgattcacgtgcgaagtatga

SEQ ID NO: 6102 - DNA, 35 bp, Artificial Sequence
  Synthetic oligonucleotide
aagaccgcgcaaacgtccaagggcgtgaccacatt

SEQ ID NO: 6103 - DNA, 38 bp, Artificial Sequence
  Synthetic oligonucleotide
acatgccggcctcccgtcgattgtatcagtgaccctca

SEQ ID NO: 6104 - DNA, 38 bp, Artificial Sequence
  Synthetic oligonucleotide
accaccgccacatgactactgcgaccagccacttgtga

SEQ ID NO: 6105 - DNA, 37 bp, Artificial Sequence
  Synthetic oligonucleotide
attcactccggtcggcctcccgtcgattgtcgaggga

SEQ ID NO: 6106 - DNA, 35 bp, Artificial Sequence
  Synthetic oligonucleotide
gacaccacctagttgacatggagcctgttattgca

SEQ ID NO: 6107 - DNA, 34 bp, Artificial Sequence
  Synthetic oligonucleotide
gccactgaccccgcgatttctgtaccgcgctacc

SEQ ID NO: 6108 - DNA, 35 bp, Artificial Sequence
  Synthetic oligonucleotide
ggagcggagagggacctcgtgcaaaggccataacg

SEQ ID NO: 6109 - DNA, 36 bp, Artificial Sequence
  Synthetic oligonucleotide
gtgccaggccataggataacagcatgcatgccacta

SEQ ID NO: 6110 - DNA, 37 bp, Artificial Sequence
  Synthetic oligonucleotide
tccacccgcagtctcatcgccttatgactagatctga

SEQ ID NO: 6111 - DNA, 35 bp, Artificial Sequence
  Synthetic oligonucleotide
gaatgccgggcaagaggaaaggacgtacccggatg

SEQ ID NO: 6112 - DNA, 35 bp, Artificial Sequence
  Synthetic oligonucleotide
gaccgcacgtacgtaggttttcacaggacttctgc

SEQ ID NO: 6113 - DNA, 35 bp, Artificial Sequence
  Synthetic oligonucleotide
gacgcaggcacgtatcacttacaacgtttattacg

SEQ ID NO: 6114 - DNA, 35 bp, Artificial Sequence
  Synthetic oligonucleotide
ttgacgtccagccagcattcctttcggacatagga

SEQ ID NO: 6115 - DNA, 37 bp, Artificial Sequence
  Synthetic oligonucleotide
aaaccgccgctaccacctgtcgttagactccctccga

SEQ ID NO: 6116 - DNA, 37 bp, Artificial Sequence
  Synthetic oligonucleotide
aacgacagtgcgtactgctactcgtcatgtgtgtcga

SEQ ID NO: 6117 - DNA, 36 bp, Artificial Sequence
  Synthetic oligonucleotide
aatgccgccacgggaggtgatcggagaggtacagga

SEQ ID NO: 6118 - DNA, 35 bp, Artificial Sequence
  Synthetic oligonucleotide
acacaacaaggacatacgagacataccctataata

SEQ ID NO: 6119 - DNA, 35 bp, Artificial Sequence
  Synthetic oligonucleotide
gcgacgaccagtagtgcttcactatgtgcttttcg

SEQ ID NO: 6120 - DNA, 35 bp, Artificial Sequence
  Synthetic oligonucleotide
tcaccaagccgacactctggtccaaggtatcgcta

SEQ ID NO: 6121 - DNA, 35 bp, Artificial Sequence
  Synthetic oligonucleotide
tcacgcatgccagaatcgcccttacctttgtcgca

SEQ ID NO: 6122 - DNA, 36 bp, Artificial Sequence
  Synthetic oligonucleotide
tcatcaacaggccacacacaagttgatttcggacaa

SEQ ID NO: 6123 - DNA, 35 bp, Artificial Sequence
  Synthetic oligonucleotide
tgacggggggggcgcggagagcgatggataaaatg

SEQ ID NO: 6124 - DNA, 35 bp, Artificial Sequence
  Synthetic oligonucleotide
atgacacgccgggtgatgtacatacactctggagc

SEQ ID NO: 6125 - DNA, 38 bp, Artificial Sequence
  Synthetic oligonucleotide
gacacgccccagcaaacaattgcaggcaccgacgctga

SEQ ID NO: 6126 - DNA, 38 bp, Artificial Sequence
  Synthetic oligonucleotide
gacactagcctagtccgcggggaccgtcatcccaatga

SEQ ID NO: 6127 - DNA, 35 bp, Artificial Sequence
  Synthetic oligonucleotide
gccgactaacgcgcactcggtacgatggaatgttc

SEQ ID NO: 6128 - DNA, 36 bp, Artificial Sequence
  Synthetic oligonucleotide
gcgcgcgtagaagataggaccgagtctgtgttgcga

SEQ ID NO: 6129 - DNA, 36 bp, Artificial Sequence
  Synthetic oligonucleotide
tgcaccggtgggcgtgatcgctaaggatgtaattga

SEQ ID NO: 6130 - DNA, 37 bp, Artificial Sequence
  Synthetic oligonucleotide
acaccaccacttccaatgaaattcgcttcctatgcga

SEQ ID NO: 6131 - DNA, 35 bp, Artificial Sequence
  Synthetic oligonucleotide
acataccgtcccaacggtatgcgacgttcggtgga

SEQ ID NO: 6132 - DNA, 37 bp, Artificial Sequence
  Synthetic oligonucleotide
atgctgcaaacgctcatgacgaacctagctctggcga

SEQ ID NO: 6133 - DNA, 35 bp, Artificial Sequence
  Synthetic oligonucleotide
gacggtcaaagatcactctcgcctcccgttacgag

SEQ ID NO: 6134 - DNA, 36 bp, Artificial Sequence
  Synthetic oligonucleotide
gacgtgacgccagggatctatacgtctactgttaga

SEQ ID NO: 6135 - DNA, 36 bp, Artificial Sequence
  Synthetic oligonucleotide
ggacccacacgcgctgaccattaactcccttaccaa

SEQ ID NO: 6136 - DNA, 35 bp, Artificial Sequence
  Synthetic oligonucleotide
tgacaacatgacgtcactcccacaatcactgctgg

SEQ ID NO: 6137 - DNA, 35 bp, Artificial Sequence
  Synthetic oligonucleotide
actcaccggcctcccgctgtatcgtgtgaatcgac

SEQ ID NO: 6138 - DNA, 36 bp, Artificial Sequence
  Synthetic oligonucleotide
atgcacacaaggggttggtgagagcttacgacaaca

SEQ ID NO: 6139 - DNA, 38 bp, Artificial Sequence
  Synthetic oligonucleotide
gaccacagcggttgtccaggatttattcactgacgtga

SEQ ID NO: 6140 - DNA, 37 bp, Artificial Sequence
  Synthetic oligonucleotide
gtggatcggtggaggggtggatggcggtcgtacggga

SEQ ID NO: 6141 - DNA, 37 bp, Artificial Sequence
  Synthetic oligonucleotide
tcacgggcggagagtgtggccaacattaaccgggtta

SEQ ID NO: 6142 - DNA, 37 bp, Artificial Sequence
  Synthetic oligonucleotide
gcaccatgcatgtgtagccctggacctcaaccatcga

SEQ ID NO: 6143 - DNA, 35 bp, Artificial Sequence
  Synthetic oligonucleotide
aaccacgccgcccgtttcgagcacccacagttgtg

SEQ ID NO: 6144 - DNA, 36 bp, Artificial Sequence
  Synthetic oligonucleotide
aaccccgccacagttgtatccaccgtcttcacctca

SEQ ID NO: 6145 - DNA, 37 bp, Artificial Sequence
  Synthetic oligonucleotide
gacccatcacaggaaggcatcattcacccgacccaga

SEQ ID NO: 6146 - DNA, 38 bp, Artificial Sequence
  Synthetic oligonucleotide
gactacgcaccagtcggtaggtaacccaacactagtga

SEQ ID NO: 6147 - DNA, 37 bp, Artificial Sequence
  Synthetic oligonucleotide
gactgaccccgtaaatattgcaatcgtaccgatgtta

SEQ ID NO: 6148 - DNA, 35 bp, Artificial Sequence
  Synthetic oligonucleotide
gaaactgtcccaacggtttcgaggatccgaagtca

SEQ ID NO: 6149 - DNA, 36 bp, Artificial Sequence
  Synthetic oligonucleotide
gaagccgacaaccacgtcaaggtgcaggatcccgca

SEQ ID NO: 6150 - DNA, 37 bp, Artificial Sequence
  Synthetic oligonucleotide
gcacgaaccccaactactgaccccgcctcgaacctga

SEQ ID NO: 6151 - DNA, 38 bp, Artificial Sequence
  Synthetic oligonucleotide
gccaaaccatctgtgatagactattcaacaaggcctga

SEQ ID NO: 6152 - DNA, 35 bp, Artificial Sequence
  Synthetic oligonucleotide
gccccacgggaggacacttagttgaagtgccagac

SEQ ID NO: 6153 - DNA, 35 bp, Artificial Sequence
  Synthetic oligonucleotide
tacacccgccgttcgcagacgcgaatgatccatct

SEQ ID NO: 6154 - DNA, 38 bp, Artificial Sequence
  Synthetic oligonucleotide
tcatgcgacgccacccagtgagaatcgttggctattga

SEQ ID NO: 6155 - DNA, 36 bp, Artificial Sequence
  Synthetic oligonucleotide
tgccagagctgcactatccagaccccggcatgctaa

SEQ ID NO: 6156 - DNA, 37 bp, Artificial Sequence
  Synthetic oligonucleotide
gacgatgcacaggggtaagtaagtcgtcgctctgaga

SEQ ID NO: 6157 - DNA, 37 bp, Artificial Sequence
  Synthetic oligonucleotide
gatgccggaaggatggcatctcatcaagtcacacgga

SEQ ID NO: 6158 - DNA, 36 bp, Artificial Sequence
  Synthetic oligonucleotide
gattaccgacacatgtactacgcttatcacttcaca

SEQ ID NO: 6159 - DNA, 37 bp, Artificial Sequence
  Synthetic oligonucleotide
gccatcgccaccatataacgttccctcgtcgcacaga

SEQ ID NO: 6160 - DNA, 35 bp, Artificial Sequence
  Synthetic oligonucleotide
gtactgaccccgataaacttgtgccgcccctcgta

SEQ ID NO: 6161 - DNA, 37 bp, Artificial Sequence
  Synthetic oligonucleotide
gacatcgccacaccgatcaatgtacaggcactgtgga

SEQ ID NO: 6162 - DNA, 35 bp, Artificial Sequence
  Synthetic oligonucleotide
gcacacgtacgcctattcccattacggtgtgtgat

SEQ ID NO: 6163 - DNA, 38 bp, Artificial Sequence
  Synthetic oligonucleotide
tcacgcccaaccatttgtgaaacgtagctacaatctga

SEQ ID NO: 6164 - DNA, 38 bp, Artificial Sequence
  Synthetic oligonucleotide
tgacgcatacgggagtaatgaagatcgaacgtttttga

SEQ ID NO: 6165 - DNA, 35 bp, Artificial Sequence
  Synthetic oligonucleotide
aattgccgccgtcgtataccctcgtttaatactgt

SEQ ID NO: 6166 - DNA, 38 bp, Artificial Sequence
  Synthetic oligonucleotide
agtgcacacgccctcgatggcatcaagagttttattga

SEQ ID NO: 6167 - DNA, 35 bp, Artificial Sequence
  Synthetic oligonucleotide
gacaccggagcccaagtgttcgtatctggcaggat

SEQ ID NO: 6168 - DNA, 36 bp, Artificial Sequence
  Synthetic oligonucleotide
gacgcgggaaccgttaacaaaatcgtaacacgggta

SEQ ID NO: 6169 - DNA, 37 bp, Artificial Sequence
  Synthetic oligonucleotide
gacgctggtcacgtctctagcattagtgtcctcttga

SEQ ID NO: 6170 - DNA, 36 bp, Artificial Sequence
  Synthetic oligonucleotide
gcgaaagaacgccgtcacatcactggtccaagccta

SEQ ID NO: 6171 - DNA, 38 bp, Artificial Sequence
  Synthetic oligonucleotide
gcgcatagcacggacgaactaaaaagacggcccattga

SEQ ID NO: 6172 - DNA, 35 bp, Artificial Sequence
  Synthetic oligonucleotide
ggacggagaaggaaagaatggcgatcgtggctagg

SEQ ID NO: 6173 - DNA, 35 bp, Artificial Sequence
  Synthetic oligonucleotide
ggtgcacgaaagtgcagcacgactagcctgtggtc

SEQ ID NO: 6174 - DNA, 38 bp, Artificial Sequence
  Synthetic oligonucleotide
gttgggagggtggggtaggggtattgcatcatgcctga

SEQ ID NO: 6175 - DNA, 37 bp, Artificial Sequence
  Synthetic oligonucleotide
tatgcgaccacctgtcattcggaaactacgagatcga

SEQ ID NO: 6176 - DNA, 37 bp, Artificial Sequence
  Synthetic oligonucleotide
tgaccaagcatcctgttgagttattgtattgggttga

SEQ ID NO: 6177 - DNA, 38 bp, Artificial Sequence
  Synthetic oligonucleotide
tgccggatagggtgcactgcatcgaaatcccaatttga

SEQ ID NO: 6178 - DNA, 35 bp, Artificial Sequence
  Synthetic oligonucleotide
aacactgcaagcccagccacgatacctctcgggat

SEQ ID NO: 6179 - DNA, 36 bp, Artificial Sequence
  Synthetic oligonucleotide
aagagccagagacacgtcgtggaattgggattctaa

SEQ ID NO: 6180 - DNA, 38 bp, Artificial Sequence
  Synthetic oligonucleotide
cactgaacaggtcaccggactataactagctgtaatga

SEQ ID NO: 6181 - DNA, 36 bp, Artificial Sequence
  Synthetic oligonucleotide
ccagcgcagagtcgcaaacggggctgaggggtctta

SEQ ID NO: 6182 - DNA, 36 bp, Artificial Sequence
  Synthetic oligonucleotide
ctgtcggggcggaggaacggtagatgcatatcggaa

SEQ ID NO: 6183 - DNA, 35 bp, Artificial Sequence
  Synthetic oligonucleotide
gaccaggtcacgtggctccaccggatgtcgtggcg

SEQ ID NO: 6184 - DNA, 36 bp, Artificial Sequence
  Synthetic oligonucleotide
gaccaagcacacagtagcggggccggctaaactgta

SEQ ID NO: 6185 - DNA, 35 bp, Artificial Sequence
  Synthetic oligonucleotide
gatggtgcaacagaatgatagattccggatcccac

SEQ ID NO: 6186 - DNA, 35 bp, Artificial Sequence
  Synthetic oligonucleotide
gcagagctcaaccctcacctcccaaaccccgtact

SEQ ID NO: 6187 - DNA, 36 bp, Artificial Sequence
  Synthetic oligonucleotide
gtgacacccgtctagcccgacaggtgccgttttgca

SEQ ID NO: 6188 - DNA, 37 bp, Artificial Sequence
  Synthetic oligonucleotide
tgagtccgtaccaggtggtatacgtacgtcattgcga

SEQ ID NO: 6189 - DNA, 34 bp, Artificial Sequence
  Synthetic oligonucleotide
atggccgaccacagggaatgatgagatgaccatg

SEQ ID NO: 6190 - DNA, 37 bp, Artificial Sequence
  Synthetic oligonucleotide
gatcgcatacacagtaaggctgacacacttcgggaga

SEQ ID NO: 6191 - DNA, 38 bp, Artificial Sequence
  Synthetic oligonucleotide
gcatgcaggaagggtggcgtgggtttggagcacattga

SEQ ID NO: 6192 - DNA, 35 bp, Artificial Sequence
  Synthetic oligonucleotide
gctcaagcgcaagcatcacgatcatccttgtcgga

SEQ ID NO: 6193 - DNA, 36 bp, Artificial Sequence
  Synthetic oligonucleotide
ggacgaccagcatgtacaaacggcatctaccctaca

SEQ ID NO: 6194 - DNA, 36 bp, Artificial Sequence
  Synthetic oligonucleotide
gtgaccatcggacaaacgatgggccaggctgcagga

SEQ ID NO: 6195 - DNA, 36 bp, Artificial Sequence
  Synthetic oligonucleotide
tcacaccccgacgaaagctccatcggacgtgcaata

SEQ ID NO: 6196 - DNA, 36 bp, Artificial Sequence
  Synthetic oligonucleotide
tgggatgcaggcatcgtaaagcggattttattgcga

SEQ ID NO: 6197 - DNA, 37 bp, Artificial Sequence
  Synthetic oligonucleotide
gagccaacgcacactgccaacgctcacactaaccgga

SEQ ID NO: 6198 - DNA, 36 bp, Artificial Sequence
  Synthetic oligonucleotide
gatgttccgctgtcatgtactgaccccgcaaattca

SEQ ID NO: 6199 - DNA, 35 bp, Artificial Sequence
  Synthetic oligonucleotide
gccctgccgccgactatctactgaccccgcaattc

SEQ ID NO: 6200 - DNA, 36 bp, Artificial Sequence
  Synthetic oligonucleotide
ggcaccgtatcccggcacgactagtgggtagagtaa

SEQ ID NO: 6201 - DNA, 36 bp, Artificial Sequence
  Synthetic oligonucleotide
agcacagggggcgtatattgcacatgtcgtgtcgta

SEQ ID NO: 6202 - DNA, 35 bp, Artificial Sequence
  Synthetic oligonucleotide
gagtcagacgccattcattcaactgcccgcctatg

SEQ ID NO: 6203 - DNA, 37 bp, Artificial Sequence
  Synthetic oligonucleotide
gcaccggtggacgtactatctcgacaccttcagtaga

SEQ ID NO: 6204 - DNA, 38 bp, Artificial Sequence
  Synthetic oligonucleotide
ggtgcgcaaaggtgtagtgcggatataggctagagtga

SEQ ID NO: 6205 - DNA, 36 bp, Artificial Sequence
  Synthetic oligonucleotide
tcctgagccgcgggaaggaacggacagtagggatca

SEQ ID NO: 6206 - DNA, 36 bp, Artificial Sequence
  Synthetic oligonucleotide
tgacggagtgtgacatacacgtagtacccggggtaa

SEQ ID NO: 6207 - DNA, 36 bp, Artificial Sequence
  Synthetic oligonucleotide
acgcgggagcgcattggttgtcgagcattgaaagaa

SEQ ID NO: 6208 - DNA, 38 bp, Artificial Sequence
  Synthetic oligonucleotide
cgcgagtcatagcacgtgcgtatacgggttgggactga

SEQ ID NO: 6209 - DNA, 37 bp, Artificial Sequence
  Synthetic oligonucleotide
ggagcccaggcgaagagagtcgtagaaaggagtgtga

SEQ ID NO: 6210 - DNA, 37 bp, Artificial Sequence
  Synthetic oligonucleotide
gtcacgccgaggagaagctgcctgcgacgaaaaacga

SEQ ID NO: 6211 - DNA, 37 bp, Artificial Sequence
  Synthetic oligonucleotide
tgcgacccaacgcagacgttccatgcatcatgcctga

SEQ ID NO: 6212 - DNA, 35 bp, Artificial Sequence
  Synthetic oligonucleotide
actgcacgtaggcgtcacgcacccacctatttgtc

SEQ ID NO: 6213 - DNA, 36 bp, Artificial Sequence
  Synthetic oligonucleotide
agacacaatcgccccgtgttgcatgcatcccgctta

SEQ ID NO: 6214 - DNA, 38 bp, Artificial Sequence
  Synthetic oligonucleotide
gacactaagcagagatgatagtctgaaaaccttggtga

SEQ ID NO: 6215 - DNA, 37 bp, Artificial Sequence
  Synthetic oligonucleotide
gccaacacaaatgttccatatgaccgtacaacgacga

SEQ ID NO: 6216 - DNA, 37 bp, Artificial Sequence
  Synthetic oligonucleotide
gctgagctcggacgttacgagcgcagcacgtgtgcga

SEQ ID NO: 6217 - DNA, 35 bp, Artificial Sequence
  Synthetic oligonucleotide
tacacgcaggaatccaaagaaccaatgtcgggcaa

SEQ ID NO: 6218 - DNA, 37 bp, Artificial Sequence
  Synthetic oligonucleotide
tgccacgatccgaagtgagtgtctgagcccaggtgga

SEQ ID NO: 6219 - DNA, 36 bp, Artificial Sequence
  Synthetic oligonucleotide
acacacagcagtactataagcttggcgacgggggga

SEQ ID NO: 6220 - DNA, 36 bp, Artificial Sequence
  Synthetic oligonucleotide
agaggcggtcagtctctcaacatggcagtcacgtca

SEQ ID NO: 6221 - DNA, 35 bp, Artificial Sequence
  Synthetic oligonucleotide
gacaaccgttaggactgtataaatgcgagtggaac

SEQ ID NO: 6222 - DNA, 35 bp, Artificial Sequence
  Synthetic oligonucleotide
gacaagccgccccccgttttgtcgacttcttacgt

SEQ ID NO: 6223 - DNA, 37 bp, Artificial Sequence
  Synthetic oligonucleotide
gatcaccggtccgactatcaccaaccctccgacgaga

SEQ ID NO: 6224 - DNA, 36 bp, Artificial Sequence
  Synthetic oligonucleotide
gcccaccgcaggtccatactactcgtactctatgta

SEQ ID NO: 6225 - DNA, 35 bp, Artificial Sequence
  Synthetic oligonucleotide
tacatccgcaacctctgtgcctacgtcaattcatg

SEQ ID NO: 6226 - DNA, 35 bp, Artificial Sequence
  Synthetic oligonucleotide
tgtgcacgcctggagaactgcgcatccatctatcc

SEQ ID NO: 6227 - DNA, 38 bp, Artificial Sequence
  Synthetic oligonucleotide
ccggacaacgcaatacatggtaggagataccatcctga

SEQ ID NO: 6228 - DNA, 35 bp, Artificial Sequence
  Synthetic oligonucleotide
gacgcgcaccccagtcgttgtccaatagataggtc

SEQ ID NO: 6229 - DNA, 35 bp, Artificial Sequence
  Synthetic oligonucleotide
gactacgcggtgggtgcggcgggaatagcgatata

SEQ ID NO: 6230 - DNA, 37 bp, Artificial Sequence
  Synthetic oligonucleotide
gatcacacctcactcgtgtgtaccatacacttcgtta

SEQ ID NO: 6231 - DNA, 38 bp, Artificial Sequence
  Synthetic oligonucleotide
tacgtgcccaccgtgagacgtatcggtatctgcattga

SEQ ID NO: 6232 - DNA, 35 bp, Artificial Sequence
  Synthetic oligonucleotide
tagccgcacaatatagcaaggagccacattcaact

SEQ ID NO: 6233 - DNA, 36 bp, Artificial Sequence
  Synthetic oligonucleotide
atccgcccctagatactgaccccggaaacacttaga

SEQ ID NO: 6234 - DNA, 38 bp, Artificial Sequence
  Synthetic oligonucleotide
gccgcacgcaaacaattgattaggttaagcagtcatga

SEQ ID NO: 6235 - DNA, 35 bp, Artificial Sequence
  Synthetic oligonucleotide
gctgagcgttactaccccgcctaaccaaccccgag

SEQ ID NO: 6236 - DNA, 37 bp, Artificial Sequence
  Synthetic oligonucleotide
gctgccaaccgtgtatatccccgtgcctcgtccggga

SEQ ID NO: 6237 - DNA, 35 bp, Artificial Sequence
  Synthetic oligonucleotide
atgcgcccactcgtaataacctcaccgtaaaacgc

SEQ ID NO: 6238 - DNA, 36 bp, Artificial Sequence
  Synthetic oligonucleotide
gcatcacccatcacactgactgacataaggctagaa

SEQ ID NO: 6239 - DNA, 37 bp, Artificial Sequence
  Synthetic oligonucleotide
gcatgccccatcagccgtgagttcgggatggcgagga

SEQ ID NO: 6240 - DNA, 37 bp, Artificial Sequence
  Synthetic oligonucleotide
gccactgaccccgatagacgtgtctaactacgttgga

SEQ ID NO: 6241 - DNA, 36 bp, Artificial Sequence
  Synthetic oligonucleotide
gtgacgcatcaatggaactcgtggaagggcttattc

SEQ ID NO: 6242 - DNA, 36 bp, Artificial Sequence
  Synthetic oligonucleotide
tccatgacgcaggtcgtgatgcgcccattatcaata

SEQ ID NO: 6243 - DNA, 35 bp, Artificial Sequence
  Synthetic oligonucleotide
accgaccgaaatgcgagtataacgtctcgatggta

SEQ ID NO: 6244 - DNA, 36 bp, Artificial Sequence
  Synthetic oligonucleotide
gacaaaggggcgacaggtgagaaccgtttggcacaa

SEQ ID NO: 6245 - DNA, 38 bp, Artificial Sequence
  Synthetic oligonucleotide
gcacatgcacatgtgctaggacgatcaactcggtgtga

SEQ ID NO: 6246 - DNA, 37 bp, Artificial Sequence
  Synthetic oligonucleotide
gcgaccacaagctgacgtaccgttacgaagcttatga

SEQ ID NO: 6247 - DNA, 37 bp, Artificial Sequence
  Synthetic oligonucleotide
gcgagatttgcctcacactatcaatcactgaccccga

SEQ ID NO: 6248 - DNA, 36 bp, Artificial Sequence
  Synthetic oligonucleotide
gcgcgcgctgactcaactggatagagtttttcagga

SEQ ID NO: 6249 - DNA, 36 bp, Artificial Sequence
  Synthetic oligonucleotide
gctgaccacgtaggaatcggcgtgagaaacggtaaa

SEQ ID NO: 6250 - DNA, 37 bp, Artificial Sequence
  Synthetic oligonucleotide
tccatccccgattgtgctaaccccgatatgccgacga

SEQ ID NO: 6251 - DNA, 35 bp, Artificial Sequence
  Synthetic oligonucleotide
aaacaaccgcccgaactgctgttcactatcaaccg

SEQ ID NO: 6252 - DNA, 36 bp, Artificial Sequence
  Synthetic oligonucleotide
acatgcaacgcgcactatccgtcgtagtctgatcga

SEQ ID NO: 6253 - DNA, 36 bp, Artificial Sequence
  Synthetic oligonucleotide
gcacacgacggcccgtgtccaagctgcagagtgcga

SEQ ID NO: 6254 - DNA, 36 bp, Artificial Sequence
  Synthetic oligonucleotide
gccccaaccacagtaccgtggagcccatgcacacaa

SEQ ID NO: 6255 - DNA, 35 bp, Artificial Sequence
  Synthetic oligonucleotide
aacccacatcgcgcaggccatcaccgaccccgtcc

SEQ ID NO: 6256 - DNA, 35 bp, Artificial Sequence
  Synthetic oligonucleotide
acgcaagaggcggacgtacaacgaacatcgaggca

SEQ ID NO: 6257 - DNA, 37 bp, Artificial Sequence
  Synthetic oligonucleotide
agcaaggtggaggcgacacacatacgctacattgcga

SEQ ID NO: 6258 - DNA, 36 bp, Artificial Sequence
  Synthetic oligonucleotide
gacacaaccgactagttaaggcaggaacggatagca

SEQ ID NO: 6259 - DNA, 35 bp, Artificial Sequence
  Synthetic oligonucleotide
gaccacgcagagaaacttatcacgtccttcgaggt

SEQ ID NO: 6260 - DNA, 37 bp, Artificial Sequence
  Synthetic oligonucleotide
gacggagcccgcaagcacgtgggcgtcgagtcacgga

SEQ ID NO: 6261 - DNA, 38 bp, Artificial Sequence
  Synthetic oligonucleotide
gagtgccggtcacttgtaagggtcggactacctgatga

SEQ ID NO: 6262 - DNA, 35 bp, Artificial Sequence
  Synthetic oligonucleotide
gtgccatgcctcggtgtacaagtatcattaagttg

SEQ ID NO: 6263 - DNA, 37 bp, Artificial Sequence
  Synthetic oligonucleotide
gttgcgcaccctggataagaagtggtttggcccccga

SEQ ID NO: 6264 - DNA, 36 bp, Artificial Sequence
  Synthetic oligonucleotide
tgacaacggcactgacgcccaacaccacgtgtttca

SEQ ID NO: 6265 - DNA, 34 bp, Artificial Sequence
  Synthetic oligonucleotide
tgagcagaactgaccccggtctaatgtggataga

SEQ ID NO: 6266 - DNA, 37 bp, Artificial Sequence
  Synthetic oligonucleotide
tgcatccgtgctgctaggagtccgttctcgttaagga

SEQ ID NO: 6267 - DNA, 37 bp, Artificial Sequence
  Synthetic oligonucleotide
acaccggggatagtgtgaacgaacaggttgcacgcga

SEQ ID NO: 6268 - DNA, 38 bp, Artificial Sequence
  Synthetic oligonucleotide
acgcggtgggcacaccatataacagagatgtcctttga

SEQ ID NO: 6269 - DNA, 35 bp, Artificial Sequence
  Synthetic oligonucleotide
gcaggccgaaggttgggctgcacgtcttcactaca

SEQ ID NO: 6270 - DNA, 37 bp, Artificial Sequence
  Synthetic oligonucleotide
gccaaacagctgggtgaacgtttcgcaagtccgtgtg

SEQ ID NO: 6271 - DNA, 36 bp, Artificial Sequence
  Synthetic oligonucleotide
gccaccacaagggcgaaaggctttgatctgttaaca

SEQ ID NO: 6272 - DNA, 37 bp, Artificial Sequence
  Synthetic oligonucleotide
tcgcggccttcgtgaacggactgcgtaatctattaga

SEQ ID NO: 6273 - DNA, 38 bp, Artificial Sequence
  Synthetic oligonucleotide
aacaatccagaccccgccacgttcggtacaaagcttga

SEQ ID NO: 6274 - DNA, 35 bp, Artificial Sequence
  Synthetic oligonucleotide
gacccgcacctacattaccgatccgcacactgtgg

SEQ ID NO: 6275 - DNA, 35 bp, Artificial Sequence
  Synthetic oligonucleotide
tcaaccagagcgcctcaccctattacgtgtgagtg

SEQ ID NO: 6276 - DNA, 38 bp, Artificial Sequence
  Synthetic oligonucleotide
tgactcagccgttccaaagttaattagaggattggtga

SEQ ID NO: 6277 - DNA, 36 bp, Artificial Sequence
  Synthetic oligonucleotide
acacgccacccgaaagtcccgaacacctactcatca

SEQ ID NO: 6278 - DNA, 37 bp, Artificial Sequence
  Synthetic oligonucleotide
gaaccgtagtgcagtcgtggtatcgattcacagtgga

SEQ ID NO: 6279 - DNA, 35 bp, Artificial Sequence
  Synthetic oligonucleotide
gtggcgtagacacacgtctgacatcacaatcaagt

SEQ ID NO: 6280 - DNA, 35 bp, Artificial Sequence
  Synthetic oligonucleotide
tgggacgcaggcggcccgacgttacgacattcgca

SEQ ID NO: 6281 - DNA, 35 bp, Artificial Sequence
  Synthetic oligonucleotide
ttgaaagccacaccaaagtaccaccgtagcaagtt

SEQ ID NO: 6282 - DNA, 36 bp, Artificial Sequence
  Synthetic oligonucleotide
gaagcaagccccagcgtatcataatattcgtcgaca

SEQ ID NO: 6283 - DNA, 38 bp, Artificial Sequence
  Synthetic oligonucleotide
gaagccgcgcgccaaagagggcaaggtcatgatgctga

SEQ ID NO: 6284 - DNA, 35 bp, Artificial Sequence
  Synthetic oligonucleotide
gaccaactgacaaacgtgtcgggtggttacggtct

SEQ ID NO: 6285 - DNA, 36 bp, Artificial Sequence
  Synthetic oligonucleotide
gaccccaggtcagtgcgtggtgagttcggagcggta

SEQ ID NO: 6286 - DNA, 38 bp, Artificial Sequence
  Synthetic oligonucleotide
tagcaacaagcggacgacattgccaatacactccttga

SEQ ID NO: 6287 - DNA, 38 bp, Artificial Sequence
  Synthetic oligonucleotide
acatgacggcctcccgtcgattgtatcagtgaccctga

SEQ ID NO: 6288 - DNA, 35 bp, Artificial Sequence
  Synthetic oligonucleotide
acattgccacgcaagcttttcgtcctgtcatcaac

SEQ ID NO: 6289 - DNA, 38 bp, Artificial Sequence
  Synthetic oligonucleotide
gagaccgcgcagagaggagagacttaagacacacatga

SEQ ID NO: 6290 - DNA, 35 bp, Artificial Sequence
  Synthetic oligonucleotide
gcactgaacacctcggacttagacgcccattctgt

SEQ ID NO: 6291 - DNA, 37 bp, Artificial Sequence
  Synthetic oligonucleotide
gtgcagaactaacagacgtgttagatgtcaggtcgga

SEQ ID NO: 6292 - DNA, 35 bp, Artificial Sequence
  Synthetic oligonucleotide
tgacacatcccggaggcaaacaaaagggacgttcc

SEQ ID NO: 6293 - DNA, 35 bp, Artificial Sequence
  Synthetic oligonucleotide
ttgacacgcacagaccggtcatcggacgcaatgca

SEQ ID NO: 6294 - DNA, 37 bp, Artificial Sequence
  Synthetic oligonucleotide
gaacaacgccgacaaataactttaccagacagttgga

SEQ ID NO: 6295 - DNA, 37 bp, Artificial Sequence
  Synthetic oligonucleotide
gcacacacggcgggaaaaagaacggtaggcaattaga

SEQ ID NO: 6296 - DNA, 35 bp, Artificial Sequence
  Synthetic oligonucleotide
gccaacatccgggcacgttcatcttagcgtactct

SEQ ID NO: 6297 - DNA, 38 bp, Artificial Sequence
  Synthetic oligonucleotide
gcgggctccgggacccgcgcgtgaactgtaaggcatga

SEQ ID NO: 6298 - DNA, 35 bp, Artificial Sequence
  Synthetic oligonucleotide
gctgcaacccattgcaccgtgactcccaaggcatc

SEQ ID NO: 6299 - DNA, 37 bp, Artificial Sequence
  Synthetic oligonucleotide
gtccgtcacaggctagtacagctcgaaatggaattga

SEQ ID NO: 6300 - DNA, 35 bp, Artificial Sequence
  Synthetic oligonucleotide
gtgcaaggtcccagacggtccgtcacaccttccga

SEQ ID NO: 6301 - DNA, 37 bp, Artificial Sequence
  Synthetic oligonucleotide
tagcaccccaccgaaccgtcctattaacgactaccga

SEQ ID NO: 6302 - DNA, 36 bp, Artificial Sequence
  Synthetic oligonucleotide
tcacagccatgggtgacgtacgtttagtagcgatca

SEQ ID NO: 6303 - DNA, 35 bp, Artificial Sequence
  Synthetic oligonucleotide
tcagtcaaggtcaccatcgagatcagggaggtcgt

SEQ ID NO: 6304 - DNA, 35 bp, Artificial Sequence
  Synthetic oligonucleotide
aacactgccatcctctgatacagctgaagtccctg

SEQ ID NO: 6305 - DNA, 35 bp, Artificial Sequence
  Synthetic oligonucleotide
gatggcaccaccccgtgacatgtcgtgagtcctag

SEQ ID NO: 6306 - DNA, 36 bp, Artificial Sequence
  Synthetic oligonucleotide
gagccaagcaccagtagtcggtaaaggcacgtggca

SEQ ID NO: 6307 - DNA, 37 bp, Artificial Sequence
  Synthetic oligonucleotide
gccaagcattgctacaatgtactcccgtttgcataga

SEQ ID NO: 6308 - DNA, 36 bp, Artificial Sequence
  Synthetic oligonucleotide
gtggtgacacgcatctggcatcacggtaccgccgta

SEQ ID NO: 6309 - DNA, 35 bp, Artificial Sequence
  Synthetic oligonucleotide
aacgagcgaaggcgaaggttaacgtccccaattta

SEQ ID NO: 6310 - DNA, 36 bp, Artificial Sequence
  Synthetic oligonucleotide
accacgctcagtgtcgtctgtatgccaacttatcca

SEQ ID NO: 6311 - DNA, 35 bp, Artificial Sequence
  Synthetic oligonucleotide
gcccacccgcctacaacccgacggttgctctctaa

SEQ ID NO: 6312 - DNA, 37 bp, Artificial Sequence
  Synthetic oligonucleotide
gcccgcaacgtgcgagacgactgtgtatttacgacga

SEQ ID NO: 6313 - DNA, 37 bp, Artificial Sequence
  Synthetic oligonucleotide
ttgcaacagccatgtgtcacactgaccatgaacttga

SEQ ID NO: 6314 - DNA, 38 bp, Artificial Sequence
  Synthetic oligonucleotide
aacaccctgtcttgacccatcagactgacctcgactga

SEQ ID NO: 6315 - DNA, 38 bp, Artificial Sequence
  Synthetic oligonucleotide
aagcccagcagcgagaggtcggccgtattagccagtga

SEQ ID NO: 6316 - DNA, 37 bp, Artificial Sequence
  Synthetic oligonucleotide
acacactgcagaatgacctacacatcgtcctgtacga

SEQ ID NO: 6317 - DNA, 36 bp, Artificial Sequence
  Synthetic oligonucleotide
accccaaccccgctgacacccgattcaagtctgtaa

SEQ ID NO: 6318 - DNA, 37 bp, Artificial Sequence
  Synthetic oligonucleotide
accgcgcaccccgaccccgtaatgaatacctcaccga

SEQ ID NO: 6319 - DNA, 35 bp, Artificial Sequence
  Synthetic oligonucleotide
cacgcaaacgacctgccgctagtgattagaacagg

SEQ ID NO: 6320 - DNA, 38 bp, Artificial Sequence
  Synthetic oligonucleotide
gacaagcccaggataaaaacgcgcatccagctagctga

SEQ ID NO: 6321 - DNA, 37 bp, Artificial Sequence
  Synthetic oligonucleotide
gacacccccatacgcacgggactcggccataaagtga

SEQ ID NO: 6322 - DNA, 36 bp, Artificial Sequence
  Synthetic oligonucleotide
gacctgacgcatgcattaacgtaacggactggagaa

SEQ ID NO: 6323 - DNA, 35 bp, Artificial Sequence
  Synthetic oligonucleotide
gatccgaacacaaccctaacccgacgaccgctggt

SEQ ID NO: 6324 - DNA, 38 bp, Artificial Sequence
  Synthetic oligonucleotide
aaccgaccgaagaggtatagagtcgagacatgatctga

SEQ ID NO: 6325 - DNA, 37 bp, Artificial Sequence
  Synthetic oligonucleotide
gtcactccatagcacgcaccgcataccgaccccgaga

SEQ ID NO: 6326 - DNA, 36 bp, Artificial Sequence
  Synthetic oligonucleotide
tacgaggacgctatgggttccacttgacacacacga

SEQ ID NO: 6327 - DNA, 38 bp, Artificial Sequence
  Synthetic oligonucleotide
tgtgccgccgcaactgtaaacgcgaggtcgcctcctga

SEQ ID NO: 6328 - DNA, 35 bp, Artificial Sequence
  Synthetic oligonucleotide
ttgcgcgcagagaaagcgtacttcccgtgacttgc

SEQ ID NO: 6329 - DNA, 38 bp, Artificial Sequence
  Synthetic oligonucleotide
acaaccgcaaagatgaacgggagtgcgctcctaagtga

SEQ ID NO: 6330 - DNA, 37 bp, Artificial Sequence
  Synthetic oligonucleotide
gaccaggaacgtactgcggcgaccctctacgatggga

SEQ ID NO: 6331 - DNA, 36 bp, Artificial Sequence
  Synthetic oligonucleotide
gaccatgaccgtctatgcgtccgttcgaaatgcgta

SEQ ID NO: 6332 - DNA, 35 bp, Artificial Sequence
  Synthetic oligonucleotide
gacgagtcacggacgaccaagccgtatatcacctc

SEQ ID NO: 6333 - DNA, 37 bp, Artificial Sequence
  Synthetic oligonucleotide
gcaacatgaaggcaacatgacacctatcacctatcga

SEQ ID NO: 6334 - DNA, 37 bp, Artificial Sequence
  Synthetic oligonucleotide
gcacgccaaatcgtcatgcatgcctcctacgtttcga

SEQ ID NO: 6335 - DNA, 36 bp, Artificial Sequence
  Synthetic oligonucleotide
gcgaggagcaggccgactcaatagacatgtggggta

SEQ ID NO: 6336 - DNA, 37 bp, Artificial Sequence
  Synthetic oligonucleotide
ggaccaacacggaaccgtacagcaccttttagttcga

SEQ ID NO: 6337 - DNA, 38 bp, Artificial Sequence
  Synthetic oligonucleotide
aacaacacgcggcccagtggagcgacgttcgagcctga

SEQ ID NO: 6338 - DNA, 38 bp, Artificial Sequence
  Synthetic oligonucleotide
acacacctaggacgtgtaggtatgtcgacatcttatga

SEQ ID NO: 6339 - DNA, 37 bp, Artificial Sequence
  Synthetic oligonucleotide
gcacacgttgggaacgcacaacgtctgtccacttgga

SEQ ID NO: 6340 - DNA, 35 bp, Artificial Sequence
  Synthetic oligonucleotide
acatgccgccgcacgcctttgagcttcccacgtcc

SEQ ID NO: 6341 - DNA, 35 bp, Artificial Sequence
  Synthetic oligonucleotide
gacgtggtcccaaccacggcaagccccatgccaag

SEQ ID NO: 6342 - DNA, 35 bp, Artificial Sequence
  Synthetic oligonucleotide
tgcgtgggcaacggcgtgctcttatccgtatttta

SEQ ID NO: 6343 - DNA, 36 bp, Artificial Sequence
  Synthetic oligonucleotide
gaccaagccgaggatgttatcgattgttcagccgga

SEQ ID NO: 6344 - DNA, 37 bp, Artificial Sequence
  Synthetic oligonucleotide
gaccgaccctggaggtcacgaggccttcactggagga

SEQ ID NO: 6345 - DNA, 37 bp, Artificial Sequence
  Synthetic oligonucleotide
gacgccaaatgggagtcatgtcatacgtcttttacga

SEQ ID NO: 6346 - DNA, 35 bp, Artificial Sequence
  Synthetic oligonucleotide
gcacgagggcaaccccgccgtacctgctaccgctg

SEQ ID NO: 6347 - DNA, 37 bp, Artificial Sequence
  Synthetic oligonucleotide
gccaccgctcgagctcctaagccatcctaaactagga

SEQ ID NO: 6348 - DNA, 35 bp, Artificial Sequence
  Synthetic oligonucleotide
gcccaaccgaccgatctcacctgataatgctgaaa

SEQ ID NO: 6349 - DNA, 36 bp, Artificial Sequence
  Synthetic oligonucleotide
gccccatctctgaccccgacgatacagtgccgtgta

SEQ ID NO: 6350 - DNA, 38 bp, Artificial Sequence
  Synthetic oligonucleotide
aaatgcgtaagacccccagtaaagtacatgccatgtga

SEQ ID NO: 6351 - DNA, 36 bp, Artificial Sequence
  Synthetic oligonucleotide
acacaccgtgatgtccagaggcattgctggtacata

SEQ ID NO: 6352 - DNA, 38 bp, Artificial Sequence
  Synthetic oligonucleotide
accccgcctccaaccccgcactcatctactcgtattga

SEQ ID NO: 6353 - DNA, 35 bp, Artificial Sequence
  Synthetic oligonucleotide
acgaccgacagtccagaagtggttaatccgagaat

SEQ ID NO: 6354 - DNA, 35 bp, Artificial Sequence
  Synthetic oligonucleotide
catgggggcgccacagtgtaggtctggaaagtggg

SEQ ID NO: 6355 - DNA, 36 bp, Artificial Sequence
  Synthetic oligonucleotide
gacgatccgccccagcataaacgaaaacactatcta

SEQ ID NO: 6356 - DNA, 38 bp, Artificial Sequence
  Synthetic oligonucleotide
gagccgaccggctgtatacgttcaactagtcattgtga

SEQ ID NO: 6357 - DNA, 37 bp, Artificial Sequence
  Synthetic oligonucleotide
gattgccacgcaaagtgcaccactggtatcacctcga

SEQ ID NO: 6358 - DNA, 38 bp, Artificial Sequence
  Synthetic oligonucleotide
tacactgccggctgtatttcgcgagtacctggaaatga

SEQ ID NO: 6359 - DNA, 35 bp, Artificial Sequence
  Synthetic oligonucleotide
tcgccactgcgaacttggtaaggcctcccgtcgat

SEQ ID NO: 6360 - DNA, 37 bp, Artificial Sequence
  Synthetic oligonucleotide
gaaacagccgaagagcatctatgcaaagcctggagga

SEQ ID NO: 6361 - DNA, 38 bp, Artificial Sequence
  Synthetic oligonucleotide
gggaacaaggcgcgggagggacgggagtgactcagtga

SEQ ID NO: 6362 - DNA, 36 bp, Artificial Sequence
  Synthetic oligonucleotide
taccgccaagcaagaaggaggaaccgagtgttaaga

SEQ ID NO: 6363 - DNA, 36 bp, Artificial Sequence
  Synthetic oligonucleotide
tccgaagcgctagaccatgctcggtaagaaactcga

SEQ ID NO: 6364 - DNA, 35 bp, Artificial Sequence
  Synthetic oligonucleotide
acatcaaccgctgccgtgtacgctccatgctgttc

SEQ ID NO: 6365 - DNA, 37 bp, Artificial Sequence
  Synthetic oligonucleotide
accaccgcccacaaattgccgacgagacattcgttga

SEQ ID NO: 6366 - DNA, 38 bp, Artificial Sequence
  Synthetic oligonucleotide
gacagaacgcgtgagagttccgtgactgctgatggtga

SEQ ID NO: 6367 - DNA, 35 bp, Artificial Sequence
  Synthetic oligonucleotide
gaccaacgcccacaatggcataaacctgtccttac

SEQ ID NO: 6368 - DNA, 37 bp, Artificial Sequence
  Synthetic oligonucleotide
gacgaacagggcgacaatcttgggagtcagtgtatga

SEQ ID NO: 6369 - DNA, 36 bp, Artificial Sequence
  Synthetic oligonucleotide
gacgccaaagcgcatgtcgcgtacggcaactaccca

SEQ ID NO: 6370 - DNA, 36 bp, Artificial Sequence
  Synthetic oligonucleotide
gatggggaacgtgcaatttgggcgaacgataccgca

SEQ ID NO: 6371 - DNA, 36 bp, Artificial Sequence
  Synthetic oligonucleotide
gcacacgcatggaaagcttacttgagcagtcgtaca

SEQ ID NO: 6372 - DNA, 35 bp, Artificial Sequence
  Synthetic oligonucleotide
gccaagtggtgggctcgtaaccttcgcatattact

SEQ ID NO: 6373 - DNA, 35 bp, Artificial Sequence
  Synthetic oligonucleotide
tgacatcagccaagtattttgagcaacgtatctac

SEQ ID NO: 6374 - DNA, 35 bp, Artificial Sequence
  Synthetic oligonucleotide
aaccgcgcaacatgtgatatttgcaaccgttcatg

SEQ ID NO: 6375 - DNA, 36 bp, Artificial Sequence
  Synthetic oligonucleotide
acacacccacgcaaaaggtacggaggcacttgggca

SEQ ID NO: 6376 - DNA, 35 bp, Artificial Sequence
  Synthetic oligonucleotide
acccacaccccagtgtgattcggtattaactcatt

SEQ ID NO: 6377 - DNA, 36 bp, Artificial Sequence
  Synthetic oligonucleotide
gaccagtccaacagcgtattacatgttatgtcgcta

SEQ ID NO: 6378 - DNA, 36 bp, Artificial Sequence
  Synthetic oligonucleotide
gatcaacgtgcaccacggacaaggagacccctcata

SEQ ID NO: 6379 - DNA, 35 bp, Artificial Sequence
  Synthetic oligonucleotide
gatgcaagagctgggagaatgtacgtgacctcctt

SEQ ID NO: 6380 - DNA, 37 bp, Artificial Sequence
  Synthetic oligonucleotide
gtgccaacaggtggtagcagacacactcggactcgga

SEQ ID NO: 6381 - DNA, 35 bp, Artificial Sequence
  Synthetic oligonucleotide
taccccccctgcatagtgctctttcgtgatcgggg

SEQ ID NO: 6382 - DNA, 35 bp, Artificial Sequence
  Synthetic oligonucleotide
tcaacccaacacctctgaggcactaactcctgacc

SEQ ID NO: 6383 - DNA, 36 bp, Artificial Sequence
  Synthetic oligonucleotide
tccacccacgctcaccatctttgccatcgacgttca

SEQ ID NO: 6384 - DNA, 37 bp, Artificial Sequence
  Synthetic oligonucleotide
tgacaggagcagtttccaccaactctccatttacgga

SEQ ID NO: 6385 - DNA, 38 bp, Artificial Sequence
  Synthetic oligonucleotide
acaggccggccatggactgacgacagttaacgttttga

SEQ ID NO: 6386 - DNA, 37 bp, Artificial Sequence
  Synthetic oligonucleotide
acccgccacgcacaagcataccctgacatcctgggga

SEQ ID NO: 6387 - DNA, 38 bp, Artificial Sequence
  Synthetic oligonucleotide
acgctacgaacggctgccagactctctttctcaactga

SEQ ID NO: 6388 - DNA, 36 bp, Artificial Sequence
  Synthetic oligonucleotide
atgcgtcggacccccacatttcgttatagtccgaaa

SEQ ID NO: 6389 - DNA, 35 bp, Artificial Sequence
  Synthetic oligonucleotide
gaccgactcacaggcatgatacacatattcatgag

SEQ ID NO: 6390 - DNA, 37 bp, Artificial Sequence
  Synthetic oligonucleotide
gacgagcaacattgcctaagaagtctcggatttcgga

SEQ ID NO: 6391 - DNA, 35 bp, Artificial Sequence
  Synthetic oligonucleotide
gagaccgggaccttcaacgtaaagaggtgtcttag

SEQ ID NO: 6392 - DNA, 37 bp, Artificial Sequence
  Synthetic oligonucleotide
gcaccaccccgcgactgttctatagcatgtgagggga

SEQ ID NO: 6393 - DNA, 38 bp, Artificial Sequence
  Synthetic oligonucleotide
tatcgcacaggccaatcgttcacgcaggacatatgtga

SEQ ID NO: 6394 - DNA, 38 bp, Artificial Sequence
  Synthetic oligonucleotide
tcaccgtgccaccagtgtaggcgactaggcctccatga

SEQ ID NO: 6395 - DNA, 37 bp, Artificial Sequence
  Synthetic oligonucleotide
tccacgccatgctcagcaaaacatatccgctaaccga

SEQ ID NO: 6396 - DNA, 38 bp, Artificial Sequence
  Synthetic oligonucleotide
acccacacacagcaatgactagcacagtttcgtcgtga

SEQ ID NO: 6397 - DNA, 36 bp, Artificial Sequence
  Synthetic oligonucleotide
gaaccgccgttcggttaagcaatacgctccatttca

SEQ ID NO: 6398 - DNA, 35 bp, Artificial Sequence
  Synthetic oligonucleotide
gacgcatggccgcactaagaccagcgattcgacac

SEQ ID NO: 6399 - DNA, 36 bp, Artificial Sequence
  Synthetic oligonucleotide
gacgccccatattcatgcattcccatgttcaatgaa

SEQ ID NO: 6400 - DNA, 35 bp, Artificial Sequence
  Synthetic oligonucleotide
gagcccgtatgcgatcatgctgaatgaccctgcta

SEQ ID NO: 6401 - DNA, 36 bp, Artificial Sequence
  Synthetic oligonucleotide
gcaccacctgaccatctatcgtacctctgtccttga

SEQ ID NO: 6402 - DNA, 36 bp, Artificial Sequence
  Synthetic oligonucleotide
gccagtgccgaagtagtgcatgacatgccggtgata

SEQ ID NO: 6403 - DNA, 35 bp, Artificial Sequence
  Synthetic oligonucleotide
gcgaacgcagcaagaccatcttccttttttccatt

SEQ ID NO: 6404 - DNA, 35 bp, Artificial Sequence
  Synthetic oligonucleotide
tacgcgcccagtattgcgttagggatcggcatggc

SEQ ID NO: 6405 - DNA, 35 bp, Artificial Sequence
  Synthetic oligonucleotide
gcacgcaggtgtagttactccacgcttttaccctt

SEQ ID NO: 6406 - DNA, 36 bp, Artificial Sequence
  Synthetic oligonucleotide
tcatcgcatcccaatgcatctgcgtttcactgctaa

SEQ ID NO: 6407 - DNA, 37 bp, Artificial Sequence
  Synthetic oligonucleotide
tgacgctgggagggtccaggtttgagttaagaaggga

SEQ ID NO: 6408 - DNA, 37 bp, Artificial Sequence
  Synthetic oligonucleotide
tgacgggacgaagaatggggacgagaatatagacgga

SEQ ID NO: 6409 - DNA, 37 bp, Artificial Sequence
  Synthetic oligonucleotide
ttgctcatggcaggccataccccgtcactgaccccga

SEQ ID NO: 6410 - DNA, 32 bp, Artificial Sequence
  Synthetic oligonucleotide
accacgcggtcgcccaccgtatcttcaccatc

SEQ ID NO: 6411 - DNA, 35 bp, Artificial Sequence
  Synthetic oligonucleotide
gatagccacatgttacgtccctgcctctaatgctc

SEQ ID NO: 6412 - DNA, 36 bp, Artificial Sequence
  Synthetic oligonucleotide
gcacaacactgaccctgaaccgtctctaactaccta

SEQ ID NO: 6413 - DNA, 37 bp, Artificial Sequence
  Synthetic oligonucleotide
gccaacgaaatgctgcacaaaagtcactgtgaatcga

SEQ ID NO: 6414 - DNA, 35 bp, Artificial Sequence
  Synthetic oligonucleotide
ggacgacgggcacgggtaaataaggacgcaatgga

SEQ ID NO: 6415 - DNA, 35 bp, Artificial Sequence
  Synthetic oligonucleotide
tacacaacgcaatctacaacaatgaacagtatcat

SEQ ID NO: 6416 - DNA, 35 bp, Artificial Sequence
  Synthetic oligonucleotide
tacgccgcagccagttcttccggaccccgcataac

SEQ ID NO: 6417 - DNA, 35 bp, Artificial Sequence
  Synthetic oligonucleotide
tgaccctgaacagtagagtgtgtaaagacaactat

SEQ ID NO: 6418 - DNA, 36 bp, Artificial Sequence
  Synthetic oligonucleotide
tgcgcaatcaaagaaagtcccaacgccgtttgttca

SEQ ID NO: 6419 - DNA, 38 bp, Artificial Sequence
  Synthetic oligonucleotide
acaacacggggcacgtgtttggtatagtctgcatgtga

SEQ ID NO: 6420 - DNA, 35 bp, Artificial Sequence
  Synthetic oligonucleotide
gagccgatcatggacacactgcgctaactctcatc

SEQ ID NO: 6421 - DNA, 36 bp, Artificial Sequence
  Synthetic oligonucleotide
gcaaccgtccggacatgttgggtgcgatcatagcga

SEQ ID NO: 6422 - DNA, 35 bp, Artificial Sequence
  Synthetic oligonucleotide
gcaacgggcggtgaaacggactacggcaaatgcat

SEQ ID NO: 6423 - DNA, 36 bp, Artificial Sequence
  Synthetic oligonucleotide
taccacagtcgggaacgagaaatgttatgcattcaa

SEQ ID NO: 6424 - DNA, 37 bp, Artificial Sequence
  Synthetic oligonucleotide
tacgacactgggtcagctgggaatcccaaacacacga

SEQ ID NO: 6425 - DNA, 38 bp, Artificial Sequence
  Synthetic oligonucleotide
gacgccgagcggcactgggtgtaaaagcgcagcaatga

SEQ ID NO: 6426 - DNA, 36 bp, Artificial Sequence
  Synthetic oligonucleotide
gatcagaccatgacctgcgtaatgctaacataatca

SEQ ID NO: 6427 - DNA, 35 bp, Artificial Sequence
  Synthetic oligonucleotide
gatgacgccgtaatgactagtgtgagccgggaacg

SEQ ID NO: 6428 - DNA, 36 bp, Artificial Sequence
  Synthetic oligonucleotide
ttgctgtgcaaacgcgccaaatgacatgtcggttga

SEQ ID NO: 6429 - DNA, 38 bp, Artificial Sequence
  Synthetic oligonucleotide
ttgggcgcccggggaaaggtgcggaacaacaggtttga

SEQ ID NO: 6430 - DNA, 36 bp, Artificial Sequence
  Synthetic oligonucleotide
atgcaatgtcagtagtccatggcaggacgaatacga

SEQ ID NO: 6431 - DNA, 35 bp, Artificial Sequence
  Synthetic oligonucleotide
gaccgaagccgaaagaaggtcagacacacggtctg

SEQ ID NO: 6432 - DNA, 37 bp, Artificial Sequence
  Synthetic oligonucleotide
gaccgaccggcaggagggacgagggttaccactctga

SEQ ID NO: 6433 - DNA, 38 bp, Artificial Sequence
  Synthetic oligonucleotide
gcacacgtgggcgtacaaagtaacgatgctctaattga

SEQ ID NO: 6434 - DNA, 36 bp, Artificial Sequence
  Synthetic oligonucleotide
gcgataggcgcctggtcaacatcgacggattacaaa

SEQ ID NO: 6435 - DNA, 37 bp, Artificial Sequence
  Synthetic oligonucleotide
tatgcaacaccacatgttccgcgctaaatcgctagga

SEQ ID NO: 6436 - DNA, 37 bp, Artificial Sequence
  Synthetic oligonucleotide
tgatgcgtgcatcgacacttcgtagttatatacctga

SEQ ID NO: 6437 - DNA, 36 bp, Artificial Sequence
  Synthetic oligonucleotide
aacgaagcgagcagggggaaagtgttgcgtacatca

SEQ ID NO: 6438 - DNA, 36 bp, Artificial Sequence
  Synthetic oligonucleotide
acacgaaccaggcaaccccgactacactgaccccaa

SEQ ID NO: 6439 - DNA, 35 bp, Artificial Sequence
  Synthetic oligonucleotide
acacgccggaggatacgtctgttaattttgtcagc

SEQ ID NO: 6440 - DNA, 36 bp, Artificial Sequence
  Synthetic oligonucleotide
gaaccaaggtcggaggtaaacgagtttgtgtaacga

SEQ ID NO: 6441 - DNA, 35 bp, Artificial Sequence
  Synthetic oligonucleotide
gacaagcggtccttctttccgtgctcccaattctt

SEQ ID NO: 6442 - DNA, 35 bp, Artificial Sequence
  Synthetic oligonucleotide
gacgcaactcagagccacacacaaccactccgtcg

SEQ ID NO: 6443 - DNA, 36 bp, Artificial Sequence
  Synthetic oligonucleotide
gatgctcaccgtggcgagacaccctccgaccccgca

SEQ ID NO: 6444 - DNA, 38 bp, Artificial Sequence
  Synthetic oligonucleotide
tcagccaacgtacagcgggcctagaagtcgaattgtga

SEQ ID NO: 6445 - DNA, 38 bp, Artificial Sequence
  Synthetic oligonucleotide
acacgtccaatcgtcgcagagacagattttatggctga

SEQ ID NO: 6446 - DNA, 36 bp, Artificial Sequence
  Synthetic oligonucleotide
agacacatcacctaccgcaaccagtcccgtcagaga

SEQ ID NO: 6447 - DNA, 35 bp, Artificial Sequence
  Synthetic oligonucleotide
agaccgactgcacacagggtggtttaaacgtcgag

SEQ ID NO: 6448 - DNA, 37 bp, Artificial Sequence
  Synthetic oligonucleotide
atgcgctggagaggaacttcgggaagtcgcggtagga

SEQ ID NO: 6449 - DNA, 35 bp, Artificial Sequence
  Synthetic oligonucleotide
gaacagagcccgtgagcaccgagaagaagcttaga

SEQ ID NO: 6450 - DNA, 38 bp, Artificial Sequence
  Synthetic oligonucleotide
gacacacaggagcggaatgctctttcaaccatacttga

SEQ ID NO: 6451 - DNA, 35 bp, Artificial Sequence
  Synthetic oligonucleotide
gcacacccagaatcactcggggctccagtaggaac

SEQ ID NO: 6452 - DNA, 37 bp, Artificial Sequence
  Synthetic oligonucleotide
tcagaccccctagacctcacagaaccgtatcgttcga

SEQ ID NO: 6453 - DNA, 35 bp, Artificial Sequence
  Synthetic oligonucleotide
accaccacaacgtcacccgccatccacacgccacg

SEQ ID NO: 6454 - DNA, 36 bp, Artificial Sequence
  Synthetic oligonucleotide
atgcaccgaggttgggacacgggtcattttagtaaa

SEQ ID NO: 6455 - DNA, 38 bp, Artificial Sequence
  Synthetic oligonucleotide
gacgcttcagtgtgcactttcggatgcggaaaaagtga

SEQ ID NO: 6456 - DNA, 38 bp, Artificial Sequence
  Synthetic oligonucleotide
aacgcacggtagctagaggaatatggtcgggcgattga

SEQ ID NO: 6457 - DNA, 36 bp, Artificial Sequence
  Synthetic oligonucleotide
aacgccggcgacgagggttcggaggatcgagatgct

SEQ ID NO: 6458 - DNA, 36 bp, Artificial Sequence
  Synthetic oligonucleotide
acacccgggcgatccacgacttgttttcagtcccaa

SEQ ID NO: 6459 - DNA, 38 bp, Artificial Sequence
  Synthetic oligonucleotide
accgaccggtaggctcgggacgtgctcggtttacttga

SEQ ID NO: 6460 - DNA, 37 bp, Artificial Sequence
  Synthetic oligonucleotide
atgtacgcgcggtgtctgtacgatgaaacaacattga

SEQ ID NO: 6461 - DNA, 35 bp, Artificial Sequence
  Synthetic oligonucleotide
gaatgcaccctcaattttccagaccccgcacaatc

SEQ ID NO: 6462 - DNA, 35 bp, Artificial Sequence
  Synthetic oligonucleotide
gacggagctgtagccctgtaaagacttcttcctaa

SEQ ID NO: 6463 - DNA, 38 bp, Artificial Sequence
  Synthetic oligonucleotide
ggtgactgtggcagacacgtactgggaagacgctttga

SEQ ID NO: 6464 - DNA, 36 bp, Artificial Sequence
  Synthetic oligonucleotide
gtcgaccagggcggttggtgggacgatcttcgtata

SEQ ID NO: 6465 - DNA, 35 bp, Artificial Sequence
  Synthetic oligonucleotide
gtgagacgtcccagtagcgagtacccaaaagggtg

SEQ ID NO: 6466 - DNA, 35 bp, Artificial Sequence
  Synthetic oligonucleotide
tgcacagtccgaagagttatggtctctcaatctct

SEQ ID NO: 6467 - DNA, 35 bp, Artificial Sequence
  Synthetic oligonucleotide
acacgctcacgattcgtaaaaagccagcacttaca

SEQ ID NO: 6468 - DNA, 37 bp, Artificial Sequence
  Synthetic oligonucleotide
accgcggtcaacactaacacacaccatcttcggtcga

SEQ ID NO: 6469 - DNA, 36 bp, Artificial Sequence
  Synthetic oligonucleotide
atgcacaacaccacaagcgacaatgccgtgatacta

SEQ ID NO: 6470 - DNA, 38 bp, Artificial Sequence
  Synthetic oligonucleotide
gccacctacgaccgtagttactgaccccgtcttattga

SEQ ID NO: 6471 - DNA, 38 bp, Artificial Sequence
  Synthetic oligonucleotide
gcccctactgaccccgcatgaaaggcctatccatgtga

SEQ ID NO: 6472 - DNA, 35 bp, Artificial Sequence
  Synthetic oligonucleotide
gcgacgcacaggtgccataccgaccccgctacaac

SEQ ID NO: 6473 - DNA, 35 bp, Artificial Sequence
  Synthetic oligonucleotide
gtgcacgtgccagtatgagatattgtcgcttttgc

SEQ ID NO: 6474 - DNA, 36 bp, Artificial Sequence
  Synthetic oligonucleotide
tacaccccgatgcacaaacgttttcgatctgccaca

SEQ ID NO: 6475 - DNA, 35 bp, Artificial Sequence
  Synthetic oligonucleotide
taccccgacactccatccccaacaaccccgtggct

SEQ ID NO: 6476 - DNA, 37 bp, Artificial Sequence
  Synthetic oligonucleotide
tcacgccgctcagtcagtggacaatttaccgttggga

SEQ ID NO: 6477 - DNA, 35 bp, Artificial Sequence
  Synthetic oligonucleotide
tgacgacggatagtgtaaatgcgataagtaaggtc

SEQ ID NO: 6478 - DNA, 37 bp, Artificial Sequence
  Synthetic oligonucleotide
tgggacgtgcaagggtaggtatcagtgatcctttgga

SEQ ID NO: 6479 - DNA, 36 bp, Artificial Sequence
  Synthetic oligonucleotide
ttgacgcacatgcataattgcccaagcgaattgaaa

SEQ ID NO: 6480 - DNA, 38 bp, Artificial Sequence
  Synthetic oligonucleotide
accatcccaatcagttaacacgcccacgtggccgctga

SEQ ID NO: 6481 - DNA, 35 bp, Artificial Sequence
  Synthetic oligonucleotide
gacaacgtacgcggtaactgtcgtaacgttcgtca

SEQ ID NO: 6482 - DNA, 36 bp, Artificial Sequence
  Synthetic oligonucleotide
gacacgcacaagtacgtactagacggcgtaaacgta

SEQ ID NO: 6483 - DNA, 37 bp, Artificial Sequence
  Synthetic oligonucleotide
gatgcgccacagctttaaggctagcccaagactcgga

SEQ ID NO: 6484 - DNA, 35 bp, Artificial Sequence
  Synthetic oligonucleotide
gcacatcctcgcgcccacttattaccgctgtgcgc

SEQ ID NO: 6485 - DNA, 35 bp, Artificial Sequence
  Synthetic oligonucleotide
gtcaccatcgcggaacgtcatgcatcctgacgatc

SEQ ID NO: 6486 - DNA, 38 bp, Artificial Sequence
  Synthetic oligonucleotide
gtgcatgctcaacactgacagcaaatcctaacctttga

SEQ ID NO: 6487 - DNA, 38 bp, Artificial Sequence
  Synthetic oligonucleotide
tcaacacacatcaggcacgcaaatttccatacatgtga

SEQ ID NO: 6488 - DNA, 36 bp, Artificial Sequence
  Synthetic oligonucleotide
tccacggctgcacgttcatgaggcggatcagaaaca

SEQ ID NO: 6489 - DNA, 36 bp, Artificial Sequence
  Synthetic oligonucleotide
tcccaaacggacgggcaagcagtaacccgataatca

SEQ ID NO: 6490 - DNA, 35 bp, Artificial Sequence
  Synthetic oligonucleotide
tgtgacggtgccaacagtttatacgagtcaacaaa

SEQ ID NO: 6491 - DNA, 38 bp, Artificial Sequence
  Synthetic oligonucleotide
acgtgaacgccccagccttacgaaactgcaaatcatga

SEQ ID NO: 6492 - DNA, 35 bp, Artificial Sequence
  Synthetic oligonucleotide
atacacgcaccgacgaacggcttcccgaccacaac

SEQ ID NO: 6493 - DNA, 36 bp, Artificial Sequence
  Synthetic oligonucleotide
cccggcagggacggatccatggcttgataacgttta

SEQ ID NO: 6494 - DNA, 37 bp, Artificial Sequence
  Synthetic oligonucleotide
gagcgaagaccccccaggacttggaaagacgcaagga

SEQ ID NO: 6495 - DNA, 37 bp, Artificial Sequence
  Synthetic oligonucleotide
gatgcgagggtgcacagtgacgactctacctttccga

SEQ ID NO: 6496 - DNA, 35 bp, Artificial Sequence
  Synthetic oligonucleotide
gtgaagcacccggcaagggtaatgaccctatactt

SEQ ID NO: 6497 - DNA, 35 bp, Artificial Sequence
  Synthetic oligonucleotide
gtgacacgacggggaagatctttgaaacacgtgcg

SEQ ID NO: 6498 - DNA, 37 bp, Artificial Sequence
  Synthetic oligonucleotide
gtggtgggcatacagagcgtaagggatttcggcaaga

SEQ ID NO: 6499 - DNA, 35 bp, Artificial Sequence
  Synthetic oligonucleotide
tacatgcagggcccacgttacacaccgagtatcct

SEQ ID NO: 6500 - DNA, 38 bp, Artificial Sequence
  Synthetic oligonucleotide
tagccgcccgcaatccaaaagaacgtccaaacagttga

SEQ ID NO: 6501 - DNA, 36 bp, Artificial Sequence
  Synthetic oligonucleotide
ttgcgacccgcccacacgcgactaagtagtcccaca

SEQ ID NO: 6502 - DNA, 36 bp, Artificial Sequence
  Synthetic oligonucleotide
acacgcacagacgtctatccgacaatggtccgacga

SEQ ID NO: 6503 - DNA, 35 bp, Artificial Sequence
  Synthetic oligonucleotide
actgaccccgggcactagtgcatcgtgtaaacgac

SEQ ID NO: 6504 - DNA, 35 bp, Artificial Sequence
  Synthetic oligonucleotide
gaccaggcctaggagattgcataaaacagactggg

SEQ ID NO: 6505 - DNA, 35 bp, Artificial Sequence
  Synthetic oligonucleotide
gaccagtgcaggcacgtaccatcgaaaggtttgac

SEQ ID NO: 6506 - DNA, 36 bp, Artificial Sequence
  Synthetic oligonucleotide
gacgccgccaatgtacgtacaaagaagtgctatcta

SEQ ID NO: 6507 - DNA, 35 bp, Artificial Sequence
  Synthetic oligonucleotide
gccagagcccaaccccgcactagacaatcccccag

SEQ ID NO: 6508 - DNA, 37 bp, Artificial Sequence
  Synthetic oligonucleotide
gttggccgtgtgctgagtatacgcgacgagaatgaga

SEQ ID NO: 6509 - DNA, 35 bp, Artificial Sequence
  Synthetic oligonucleotide
taccgccgcactacaccatgggaatcaggtgtacc

SEQ ID NO: 6510 - DNA, 35 bp, Artificial Sequence
  Synthetic oligonucleotide
tactgaccccgaaaactgccggaccccgtccactg

SEQ ID NO: 6511 - DNA, 35 bp, Artificial Sequence
  Synthetic oligonucleotide
tcaacaggccccccacgaggacataaagcgttcat

SEQ ID NO: 6512 - DNA, 35 bp, Artificial Sequence
  Synthetic oligonucleotide
tcaatcgcgcacagtctacaggtctactggggtgc

SEQ ID NO: 6513 - DNA, 37 bp, Artificial Sequence
  Synthetic oligonucleotide
tccacacggaccattctcgtacagctgggatgtacga

SEQ ID NO: 6514 - DNA, 36 bp, Artificial Sequence
  Synthetic oligonucleotide
accacgacgagccggtccgaagcaggcagtggttaa

SEQ ID NO: 6515 - DNA, 36 bp, Artificial Sequence
  Synthetic oligonucleotide
agccacgacgggagttgcaataataccctgttggga

SEQ ID NO: 6516 - DNA, 35 bp, Artificial Sequence
  Synthetic oligonucleotide
cgtggccaagctatcgatacgtaagagaggtggat

SEQ ID NO: 6517 - DNA, 35 bp, Artificial Sequence
  Synthetic oligonucleotide
gaccatccaggtcaggctgctttacgcttcacttc

SEQ ID NO: 6518 - DNA, 34 bp, Artificial Sequence
  Synthetic oligonucleotide
gacgcgactcaccaaataaggagacggatcgtcg

SEQ ID NO: 6519 - DNA, 33 bp, Artificial Sequence
  Synthetic oligonucleotide
gatgcaggagtcacctcgtcggacgtaggccaa

SEQ ID NO: 6520 - DNA, 32 bp, Artificial Sequence
  Synthetic oligonucleotide
ggaacacgtacgagcaaacgtaaaggatgcaa

SEQ ID NO: 6521 - DNA, 36 bp, Artificial Sequence
  Synthetic oligonucleotide
tccaaccacgctgatcatggttacggttacgaataa

SEQ ID NO: 6522 - DNA, 35 bp, Artificial Sequence
  Synthetic oligonucleotide
acatgcggtcgatgcttctcaatccttgtccacac

SEQ ID NO: 6523 - DNA, 35 bp, Artificial Sequence
  Synthetic oligonucleotide
acttgccacctcacctcaacgctgacttaagcaca

SEQ ID NO: 6524 - DNA, 35 bp, Artificial Sequence
  Synthetic oligonucleotide
agccaacggccgctggataccctagacgaaacaaa

SEQ ID NO: 6525 - DNA, 38 bp, Artificial Sequence
  Synthetic oligonucleotide
gacagtcgcagggttgaactctcacacagtagaattga

SEQ ID NO: 6526 - DNA, 36 bp, Artificial Sequence
  Synthetic oligonucleotide
gaccgactatgcagtgctactcgaagttttaagaca

SEQ ID NO: 6527 - DNA, 37 bp, Artificial Sequence
  Synthetic oligonucleotide
gcacacagtgaggggtgtacgatgagacgtgttggga

SEQ ID NO: 6528 - DNA, 35 bp, Artificial Sequence
  Synthetic oligonucleotide
gcacgccgaactccatgtttagtaccatggatggg

SEQ ID NO: 6529 - DNA, 36 bp, Artificial Sequence
  Synthetic oligonucleotide
gccacagcaagtgtggaagcttgtctcggggatgga

SEQ ID NO: 6530 - DNA, 37 bp, Artificial Sequence
  Synthetic oligonucleotide
gccaccatcatgagcgtgggatttaggccgttgttga

SEQ ID NO: 6531 - DNA, 37 bp, Artificial Sequence
  Synthetic oligonucleotide
tgcacccgccgcgaaaaggacggacatttgtgaggga

SEQ ID NO: 6532 - DNA, 37 bp, Artificial Sequence
  Synthetic oligonucleotide
aacccgcaagcacacatctgatgtagggaacgtacga

SEQ ID NO: 6533 - DNA, 35 bp, Artificial Sequence
  Synthetic oligonucleotide
agcacaccaaccgattgagcctctcgcgctcgacg

SEQ ID NO: 6534 - DNA, 37 bp, Artificial Sequence
  Synthetic oligonucleotide
gaagacgacgaattgtagggccatcgactatggacga

SEQ ID NO: 6535 - DNA, 36 bp, Artificial Sequence
  Synthetic oligonucleotide
gaccacacacacgctttgaagcgctaacgacctaca

SEQ ID NO: 6536 - DNA, 36 bp, Artificial Sequence
  Synthetic oligonucleotide
gatccccgccgacgggtaagtaatgacgactagcga

SEQ ID NO: 6537 - DNA, 34 bp, Artificial Sequence
  Synthetic oligonucleotide
gcatccccagaggcaccgcaacgttccagctgtc

SEQ ID NO: 6538 - DNA, 36 bp, Artificial Sequence
  Synthetic oligonucleotide
gcccacggccgacctctatcaataccttagtcacga

SEQ ID NO: 6539 - DNA, 36 bp, Artificial Sequence
  Synthetic oligonucleotide
gccgagcgctgacaccagatccgtcgttgcacccca

SEQ ID NO: 6540 - DNA, 37 bp, Artificial Sequence
  Synthetic oligonucleotide
tcccaaaccgcaccactttatatgtacagtattgtga

SEQ ID NO: 6541 - DNA, 37 bp, Artificial Sequence
  Synthetic oligonucleotide
tccgcacccccatcgctaattagcggcccattgtcga

SEQ ID NO: 6542 - DNA, 37 bp, Artificial Sequence
  Synthetic oligonucleotide
tgccccccgtcgattttctgaacgtgcattctcagga

SEQ ID NO: 6543 - DNA, 36 bp, Artificial Sequence
  Synthetic oligonucleotide
ttgaagcccaaccccgtataacttcgtcccgtcgta

SEQ ID NO: 6544 - DNA, 35 bp, Artificial Sequence
  Synthetic oligonucleotide
ttgccagtacggtccaggcgattttaatactgttt

SEQ ID NO: 6545 - DNA, 36 bp, Artificial Sequence
  Synthetic oligonucleotide
acaccagtcgcccagtgatcgaatgtcagcatgcca

SEQ ID NO: 6546 - DNA, 37 bp, Artificial Sequence
  Synthetic oligonucleotide
acagtggccaacgacgtatcctgcagagaatgtgcga

SEQ ID NO: 6547 - DNA, 36 bp, Artificial Sequence
  Synthetic oligonucleotide
agcaacgggccgacgcgagcaagtactctattacga

SEQ ID NO: 6548 - DNA, 35 bp, Artificial Sequence
  Synthetic oligonucleotide
gacacgcagtctttggctttctataccgggttacg

SEQ ID NO: 6549 - DNA, 35 bp, Artificial Sequence
  Synthetic oligonucleotide
gatcacactcgcagtgttgggcgctacattcatca

SEQ ID NO: 6550 - DNA, 38 bp, Artificial Sequence
  Synthetic oligonucleotide
gcgacctgcaggcgatgaattgtccgctacccccttga

SEQ ID NO: 6551 - DNA, 37 bp, Artificial Sequence
  Synthetic oligonucleotide
ggatcgcaccaataggacacgcgcagtctacctctga

SEQ ID NO: 6552 - DNA, 36 bp, Artificial Sequence
  Synthetic oligonucleotide
taacaccagatgcccacatactgtaacgaccaccta

SEQ ID NO: 6553 - DNA, 36 bp, Artificial Sequence
  Synthetic oligonucleotide
tcaacggagatgccatgccgttcgatcccggtgtaa

SEQ ID NO: 6554 - DNA, 36 bp, Artificial Sequence
  Synthetic oligonucleotide
acccacacggggacgtactcaagccggcgaatacca

SEQ ID NO: 6555 - DNA, 36 bp, Artificial Sequence
  Synthetic oligonucleotide
acgcacatagtcccaacgtcgcatcgaagccctaaa

SEQ ID NO: 6556 - DNA, 37 bp, Artificial Sequence
  Synthetic oligonucleotide
tacgcgtacgaaggtgtgtcacttaacagtcgcagga

SEQ ID NO: 6557 - DNA, 36 bp, Artificial Sequence
  Synthetic oligonucleotide
tgcgagtcggacgagcaacatctactgcgaagcacg

SEQ ID NO: 6558 - DNA, 35 bp, Artificial Sequence
  Synthetic oligonucleotide
gacccatcacacaagtcgcagctagcccacttagc

SEQ ID NO: 6559 - DNA, 36 bp, Artificial Sequence
  Synthetic oligonucleotide
gacgacgatccgatcgtgcggggcaagacaagccta

SEQ ID NO: 6560 - DNA, 36 bp, Artificial Sequence
  Synthetic oligonucleotide
gactggtccattattatcctacgacgttgacagcaa

SEQ ID NO: 6561 - DNA, 35 bp, Artificial Sequence
  Synthetic oligonucleotide
gagatcgcgacccgctaacttcaaactgggaaatg

SEQ ID NO: 6562 - DNA, 36 bp, Artificial Sequence
  Synthetic oligonucleotide
gcaccacacgtggctctaacaactgaactcgcacca

SEQ ID NO: 6563 - DNA, 35 bp, Artificial Sequence
  Synthetic oligonucleotide
gcactgaccccgaaattattttaaacagcatccct

SEQ ID NO: 6564 - DNA, 37 bp, Artificial Sequence
  Synthetic oligonucleotide
gcagtcgaacgtgcacgaacaagaagtggctagtgga

SEQ ID NO: 6565 - DNA, 36 bp, Artificial Sequence
  Synthetic oligonucleotide
gccatgcgagcggtacgaacaatgcacacgtatgaa

SEQ ID NO: 6566 - DNA, 36 bp, Artificial Sequence
  Synthetic oligonucleotide
ggtcgagctggcgtagaccacgatacggatagcata

SEQ ID NO: 6567 - DNA, 38 bp, Artificial Sequence
  Synthetic oligonucleotide
tcagaccatcgcccagagtcctcgtcccacagctgtga

SEQ ID NO: 6568 - DNA, 36 bp, Artificial Sequence
  Synthetic oligonucleotide
tgccaccaactacaactgaactgacagagccacaca

SEQ ID NO: 6569 - DNA, 35 bp, Artificial Sequence
  Synthetic oligonucleotide
aacgcacagttgcagccttgaacggtcgaggaata

SEQ ID NO: 6570 - DNA, 38 bp, Artificial Sequence
  Synthetic oligonucleotide
accaccgcggggatggatccactcaggtttgggactga

SEQ ID NO: 6571 - DNA, 38 bp, Artificial Sequence
  Synthetic oligonucleotide
gacaactcggcacaatcgtctacacgggtcactggtga

SEQ ID NO: 6572 - DNA, 35 bp, Artificial Sequence
  Synthetic oligonucleotide
gaccatccgcgccctacgcatccttcgagccatgt

SEQ ID NO: 6573 - DNA, 36 bp, Artificial Sequence
  Synthetic oligonucleotide
gcaacatgctgactggtgtacgtactcgcctgaata

SEQ ID NO: 6574 - DNA, 36 bp, Artificial Sequence
  Synthetic oligonucleotide
gcatgcaccactcccgccgactccaattatcggcaa

SEQ ID NO: 6575 - DNA, 35 bp, Artificial Sequence
  Synthetic oligonucleotide
gctgacgggccaccatattgtctttgtattctttt

SEQ ID NO: 6576 - DNA, 36 bp, Artificial Sequence
  Synthetic oligonucleotide
gctggggcacaatggcttcaagataatttcaccaca

SEQ ID NO: 6577 - DNA, 36 bp, Artificial Sequence
  Synthetic oligonucleotide
gtcgcccgcatgacgatccagactcctactcgtgta

SEQ ID NO: 6578 - DNA, 35 bp, Artificial Sequence
  Synthetic oligonucleotide
gtggatcacgtacaggctagttcgattcaatccta

SEQ ID NO: 6579 - DNA, 36 bp, Artificial Sequence
  Synthetic oligonucleotide
tcaccgggtcctggctatgcgaagagcaaatgatga

SEQ ID NO: 6580 - DNA, 37 bp, Artificial Sequence
  Synthetic oligonucleotide
tgagacggagtcgaaacgtgatgtggtcatgtgttga

SEQ ID NO: 6581 - DNA, 36 bp, Artificial Sequence
  Synthetic oligonucleotide
tgagagccccagacgaagtaagactgacgttcagga

SEQ ID NO: 6582 - DNA, 38 bp, Artificial Sequence
  Synthetic oligonucleotide
tgtgtcgcgggggggatgagtcaactcgacagaagtga

SEQ ID NO: 6583 - DNA, 35 bp, Artificial Sequence
  Synthetic oligonucleotide
aatgccgaggcgtgcggacatgtcaccgacccaca

SEQ ID NO: 6584 - DNA, 36 bp, Artificial Sequence
  Synthetic oligonucleotide
acgtggtgagccgaccatcctttccactgaccccga

SEQ ID NO: 6585 - DNA, 38 bp, Artificial Sequence
  Synthetic oligonucleotide
gacgtcggtcagtcgcgctattccgtaaccccctacga

SEQ ID NO: 6586 - DNA, 35 bp, Artificial Sequence
  Synthetic oligonucleotide
gcaaccccaggcaaaagcccctgcgagaagaaatg

SEQ ID NO: 6587 - DNA, 38 bp, Artificial Sequence
  Synthetic oligonucleotide
gcaccaggcgatcgcgttgagctggcacagtgggctga

SEQ ID NO: 6588 - DNA, 38 bp, Artificial Sequence
  Synthetic oligonucleotide
gcctctccaccctgaccccgcatagagaaccccggtga

SEQ ID NO: 6589 - DNA, 36 bp, Artificial Sequence
  Synthetic oligonucleotide
gtagcacaacccgtcatatcccgccctctaaaacga

SEQ ID NO: 6590 - DNA, 35 bp, Artificial Sequence
  Synthetic oligonucleotide
tcactaagcggccattaacctcaacacgagcactg

SEQ ID NO: 6591 - DNA, 37 bp, Artificial Sequence
  Synthetic oligonucleotide
tcagtcaacgaggacgtgcatcagccatgtatgagga

SEQ ID NO: 6592 - DNA, 35 bp, Artificial Sequence
  Synthetic oligonucleotide
gacacggaacatgcggagctaacaggacgagtgac

SEQ ID NO: 6593 - DNA, 35 bp, Artificial Sequence
  Synthetic oligonucleotide
gagccccacaaaagcgtgacgacggcgtaactttg

SEQ ID NO: 6594 - DNA, 38 bp, Artificial Sequence
  Synthetic oligonucleotide
gatgagagcgcgcacgtactgttggatactcgacttga

SEQ ID NO: 6595 - DNA, 35 bp, Artificial Sequence
  Synthetic oligonucleotide
gcaccacaagattgcggtcaaccttttcattgcta

SEQ ID NO: 6596 - DNA, 37 bp, Artificial Sequence
  Synthetic oligonucleotide
gtgaacagtactgatatcccaatatcgtacggtgaga

SEQ ID NO: 6597 - DNA, 35 bp, Artificial Sequence
  Synthetic oligonucleotide
taaccggacgcacatgcacctatgacctcacctca

SEQ ID NO: 6598 - DNA, 35 bp, Artificial Sequence
  Synthetic oligonucleotide
tcactgccacagtccgacgttgaggcgacaaatct

SEQ ID NO: 6599 - DNA, 35 bp, Artificial Sequence
  Synthetic oligonucleotide
tgcaaccgccaaccttaccccgtgtcaccttcagg

SEQ ID NO: 6600 - DNA, 36 bp, Artificial Sequence
  Synthetic oligonucleotide
ttgaccgcagaccgttatttgaccaccgcgagagca

SEQ ID NO: 6601 - DNA, 37 bp, Artificial Sequence
  Synthetic oligonucleotide
acacgcaaagggcaacaaaatagcgttgggtccgaga

SEQ ID NO: 6602 - DNA, 35 bp, Artificial Sequence
  Synthetic oligonucleotide
acgaagcacacgcaaagtgcttgaagtcatcgaga

SEQ ID NO: 6603 - DNA, 35 bp, Artificial Sequence
  Synthetic oligonucleotide
actgaccccgaaggcgtaggtggcttggtactaat

SEQ ID NO: 6604 - DNA, 38 bp, Artificial Sequence
  Synthetic oligonucleotide
atgccccagggcggaatgcgcattaaccccgtacctga

SEQ ID NO: 6605 - DNA, 37 bp, Artificial Sequence
  Synthetic oligonucleotide
gactaggcgcatgtgggaagcacgaagaacacgctga

SEQ ID NO: 6606 - DNA, 36 bp, Artificial Sequence
  Synthetic oligonucleotide
gagcacacgcagcatgtgcgtcgtacaaactacaaa

SEQ ID NO: 6607 - DNA, 35 bp, Artificial Sequence
  Synthetic oligonucleotide
gatctgcgcagactgtacgtcggtaaacataactg

SEQ ID NO: 6608 - DNA, 37 bp, Artificial Sequence
  Synthetic oligonucleotide
gattgcacagggcacgagacaatggactatcaaggga

SEQ ID NO: 6609 - DNA, 37 bp, Artificial Sequence
  Synthetic oligonucleotide
gcgaaccgcatcgagcactgttaagaaggtttcatga

SEQ ID NO: 6610 - DNA, 35 bp, Artificial Sequence
  Synthetic oligonucleotide
gcgacgcaaacggactgcaccttccgataacacca

SEQ ID NO: 6611 - DNA, 35 bp, Artificial Sequence
  Synthetic oligonucleotide
tatctaccccggcaataacacatacagaccccgtg

SEQ ID NO: 6612 - DNA, 35 bp, Artificial Sequence
  Synthetic oligonucleotide
tcagtcggtcgcatgctaagactttgtgcaggttg

SEQ ID NO: 6613 - DNA, 33 bp, Artificial Sequence
  Synthetic oligonucleotide
tgtgcaacagtcgctcccaaactatctacttct

SEQ ID NO: 6614 - DNA, 36 bp, Artificial Sequence
  Synthetic oligonucleotide
aaacgcaggagacgttccagcggcaatccaacttca

SEQ ID NO: 6615 - DNA, 38 bp, Artificial Sequence
  Synthetic oligonucleotide
acccaccaaacaccccagtgtgatggactatcgactga

SEQ ID NO: 6616 - DNA, 35 bp, Artificial Sequence
  Synthetic oligonucleotide
agtcactgccgcaaacacaactaagtctcacaacg

SEQ ID NO: 6617 - DNA, 35 bp, Artificial Sequence
  Synthetic oligonucleotide
gatccagcaactgactcgctgcttactgaccccgc

SEQ ID NO: 6618 - DNA, 38 bp, Artificial Sequence
  Synthetic oligonucleotide
gcacgctgcgacaactaaataaaggccggttgcgttga

SEQ ID NO: 6619 - DNA, 37 bp, Artificial Sequence
  Synthetic oligonucleotide
tcaaccgacgacgtaacggtactggagtacgtgtgga

SEQ ID NO: 6620 - DNA, 35 bp, Artificial Sequence
  Synthetic oligonucleotide
tcagacccacagttcggaaggaaagtccttgcgtg

SEQ ID NO: 6621 - DNA, 36 bp, Artificial Sequence
  Synthetic oligonucleotide
tgacggaggccacagctcgtcaatacgcgttacaaa

SEQ ID NO: 6622 - DNA, 35 bp, Artificial Sequence
  Synthetic oligonucleotide
tgatgcagaaggagctagggatcttctaaataacg

SEQ ID NO: 6623 - DNA, 36 bp, Artificial Sequence
  Synthetic oligonucleotide
aatgcgcccatcaaagctatgaaccaggcacgtgta

SEQ ID NO: 6624 - DNA, 35 bp, Artificial Sequence
  Synthetic oligonucleotide
atcggtccacatatccagaccccgcgtggccggaa

SEQ ID NO: 6625 - DNA, 37 bp, Artificial Sequence
  Synthetic oligonucleotide
gacacgcacggatcccattcattacgtcaattcatga

SEQ ID NO: 6626 - DNA, 36 bp, Artificial Sequence
  Synthetic oligonucleotide
gacgcgagcccgacaatagtcacatggaacaccgca

SEQ ID NO: 6627 - DNA, 37 bp, Artificial Sequence
  Synthetic oligonucleotide
gcacggacaacatcacccagcttagtgccattcagga

SEQ ID NO: 6628 - DNA, 38 bp, Artificial Sequence
  Synthetic oligonucleotide
gcccacgcctctgatgctcgttcaaatttagacgttga

SEQ ID NO: 6629 - DNA, 36 bp, Artificial Sequence
  Synthetic oligonucleotide
gcgacgcccatccgtcgttaacgttatccactcaca

SEQ ID NO: 6630 - DNA, 37 bp, Artificial Sequence
  Synthetic oligonucleotide
gtgcccaccgtcttttcccaccctacaaacaccgtga

SEQ ID NO: 6631 - DNA, 35 bp, Artificial Sequence
  Synthetic oligonucleotide
gtgtgccgcccgtttcgaatgttgtgcaagtgaag

SEQ ID NO: 6632 - DNA, 35 bp, Artificial Sequence
  Synthetic oligonucleotide
tgcccgaaactatacccgaccccgcacaatgactt

SEQ ID NO: 6633 - DNA, 36 bp, Artificial Sequence
  Synthetic oligonucleotide
tgtgctccaacgatcatccgatgagagcaatgggta

SEQ ID NO: 6634 - DNA, 37 bp, Artificial Sequence
  Synthetic oligonucleotide
aaccaccgccgtgcagactgcatactcactgccctga

SEQ ID NO: 6635 - DNA, 37 bp, Artificial Sequence
  Synthetic oligonucleotide
gaccacgtcaggcaagacctagatcaggggacgttga

SEQ ID NO: 6636 - DNA, 36 bp, Artificial Sequence
  Synthetic oligonucleotide
gcacacagcagaatgctacttagttcgccagtcgta

SEQ ID NO: 6637 - DNA, 36 bp, Artificial Sequence
  Synthetic oligonucleotide
gccggagcatcctgggtaactgatgagttagatgga

SEQ ID NO: 6638 - DNA, 35 bp, Artificial Sequence
  Synthetic oligonucleotide
tgtgaactcgatccagcaggtatagtcgctcgagt

SEQ ID NO: 6639 - DNA, 36 bp, Artificial Sequence
  Synthetic oligonucleotide
aacaaccgcatgatgcaacacagcagtcgacccgta

SEQ ID NO: 6640 - DNA, 36 bp, Artificial Sequence
  Synthetic oligonucleotide
acaacaagctggccgaattgtgcgtcacaggattca

SEQ ID NO: 6641 - DNA, 38 bp, Artificial Sequence
  Synthetic oligonucleotide
cgcgaagcaagcggccgtatatgcatcaggattgttga

SEQ ID NO: 6642 - DNA, 37 bp, Artificial Sequence
  Synthetic oligonucleotide
aactgcacgacgcaaattaaggatgatcgcttgtcga

SEQ ID NO: 6643 - DNA, 35 bp, Artificial Sequence
  Synthetic oligonucleotide
gcccacgtagggcgtgatcgaaagtactgtctctt

SEQ ID NO: 6644 - DNA, 35 bp, Artificial Sequence
  Synthetic oligonucleotide
gcgaaacagcaacagtggaactacaactcctgcaa

SEQ ID NO: 6645 - DNA, 35 bp, Artificial Sequence
  Synthetic oligonucleotide
ggactaccccaacgaagaaacatgacctgtttcgt

SEQ ID NO: 6646 - DNA, 35 bp, Artificial Sequence
  Synthetic oligonucleotide
gtgaacgcctagtaagtgagcggctcgaaaccagt

SEQ ID NO: 6647 - DNA, 35 bp, Artificial Sequence
  Synthetic oligonucleotide
tgaccccaacacgtatcgcgatccgctccatactt

SEQ ID NO: 6648 - DNA, 35 bp, Artificial Sequence
  Synthetic oligonucleotide
tgagcacacaccagacgccatctatcctcaccaac

SEQ ID NO: 6649 - DNA, 36 bp, Artificial Sequence
  Synthetic oligonucleotide
tgtcagggagccgcggtcgacaatgacatgtaagga

SEQ ID NO: 6650 - DNA, 38 bp, Artificial Sequence
  Synthetic oligonucleotide
aaccacgggtcacggaagtaaacaacggtcaaacttga

SEQ ID NO: 6651 - DNA, 37 bp, Artificial Sequence
  Synthetic oligonucleotide
atggtgccgctcatgctaactcgctacaagacggaga

SEQ ID NO: 6652 - DNA, 37 bp, Artificial Sequence
  Synthetic oligonucleotide
gacgacgccctccgtgttcgcaagttccctcaaatga

SEQ ID NO: 6653 - DNA, 38 bp, Artificial Sequence
  Synthetic oligonucleotide
gactgacccctgcaagaagcagtccggctagatgctga

SEQ ID NO: 6654 - DNA, 35 bp, Artificial Sequence
  Synthetic oligonucleotide
gccagagcccaaccccgcactagacaatccccctt

SEQ ID NO: 6655 - DNA, 38 bp, Artificial Sequence
  Synthetic oligonucleotide
gtggacaagcagacgtgttatcctgaattagtctttga

SEQ ID NO: 6656 - DNA, 35 bp, Artificial Sequence
  Synthetic oligonucleotide
aacacccgcgctagtcggtacatacgcttggacct

SEQ ID NO: 6657 - DNA, 35 bp, Artificial Sequence
  Synthetic oligonucleotide
acatgcgaacgtacggatgcaatctcctttacttc

SEQ ID NO: 6658 - DNA, 38 bp, Artificial Sequence
  Synthetic oligonucleotide
cagcgcaagctggcgtgtcaggtatgaatcaggtttga

SEQ ID NO: 6659 - DNA, 38 bp, Artificial Sequence
  Synthetic oligonucleotide
gacacgacagggtgcgctacagaaagcgtgtcgaatga

SEQ ID NO: 6660 - DNA, 35 bp, Artificial Sequence
  Synthetic oligonucleotide
gaccggggggcacgtggataggccagtactcgaaa

SEQ ID NO: 6661 - DNA, 36 bp, Artificial Sequence
  Synthetic oligonucleotide
gatccgacagcagtattgaacacttctcgagttgga

SEQ ID NO: 6662 - DNA, 37 bp, Artificial Sequence
  Synthetic oligonucleotide
gccaggtgccgtgcagggggagggcattttcgtggga

SEQ ID NO: 6663 - DNA, 36 bp, Artificial Sequence
  Synthetic oligonucleotide
gtgaacggccgaacgctacactcgtctacttctcca

SEQ ID NO: 6664 - DNA, 38 bp, Artificial Sequence
  Synthetic oligonucleotide
tatgccccaagcacagggaatcgacgttctttcgctga

SEQ ID NO: 6665 - DNA, 35 bp, Artificial Sequence
  Synthetic oligonucleotide
tcacccacacacttataccgtatttgaccacaaac

SEQ ID NO: 6666 - DNA, 37 bp, Artificial Sequence
  Synthetic oligonucleotide
gagacacgccgcttgagagtaacggataatagggaga

SEQ ID NO: 6667 - DNA, 38 bp, Artificial Sequence
  Synthetic oligonucleotide
gcgaacgcaggacttgttactagcggtcacgtagctga

SEQ ID NO: 6668 - DNA, 35 bp, Artificial Sequence
  Synthetic oligonucleotide
gcttccactcctgaccccgtttttcaacaatgacc

SEQ ID NO: 6669 - DNA, 36 bp, Artificial Sequence
  Synthetic oligonucleotide
gttgccggcgaagaccccctagaccgaattatggaa

SEQ ID NO: 6670 - DNA, 38 bp, Artificial Sequence
  Synthetic oligonucleotide
gttgcgccaacgattccacatcaacaacaatactgtga

SEQ ID NO: 6671 - DNA, 37 bp, Artificial Sequence
  Synthetic oligonucleotide
tacccaaccgaaaagagccgtgattaagtcagtgaga

SEQ ID NO: 6672 - DNA, 38 bp, Artificial Sequence
  Synthetic oligonucleotide
tccacagtcggctgcttgcgattgtgaaacgtggatga

SEQ ID NO: 6673 - DNA, 36 bp, Artificial Sequence
  Synthetic oligonucleotide
tcctgaccccgccgcttaacagtcgctgactcgtca

SEQ ID NO: 6674 - DNA, 35 bp, Artificial Sequence
  Synthetic oligonucleotide
tgactcgcatggtcactcaactcgacccacacgtt

SEQ ID NO: 6675 - DNA, 38 bp, Artificial Sequence
  Synthetic oligonucleotide
gacgccgactggagggaacgttaaacgcgagtctatga

SEQ ID NO: 6676 - DNA, 36 bp, Artificial Sequence
  Synthetic oligonucleotide
gatgcgaccaggttggaccgagactctctggatgga

SEQ ID NO: 6677 - DNA, 35 bp, Artificial Sequence
  Synthetic oligonucleotide
gtcaacgtaccgctgcaccttacacgtttcctgac

SEQ ID NO: 6678 - DNA, 37 bp, Artificial Sequence
  Synthetic oligonucleotide
gtggatcagccgcggaagtattaagaccattgcttga

SEQ ID NO: 6679 - DNA, 38 bp, Artificial Sequence
  Synthetic oligonucleotide
acatgccggcctcccgtcgattgtatcagtgaccctta

SEQ ID NO: 6680 - DNA, 37 bp, Artificial Sequence
  Synthetic oligonucleotide
gatgcacgcaggccaaaagggggagaacagcagtaga

SEQ ID NO: 6681 - DNA, 38 bp, Artificial Sequence
  Synthetic oligonucleotide
gcgatgtgcagacattgtatcgactgtgttgaggttga

SEQ ID NO: 6682 - DNA, 36 bp, Artificial Sequence
  Synthetic oligonucleotide
gtgaccggtcaaggtgcgtccggcgataccttgcca

SEQ ID NO: 6683 - DNA, 35 bp, Artificial Sequence
  Synthetic oligonucleotide
gtgcccccaactcacgtggtctacccgcaatcgtg

SEQ ID NO: 6684 - DNA, 35 bp, Artificial Sequence
  Synthetic oligonucleotide
gttgcgaggccagttcagtgaagagtcgagaagca

SEQ ID NO: 6685 - DNA, 35 bp, Artificial Sequence
  Synthetic oligonucleotide
gacacatcgaactcgtaccccacaataacatcacg

SEQ ID NO: 6686 - DNA, 35 bp, Artificial Sequence
  Synthetic oligonucleotide
gacagttgcaggtcggaatgcgcggattgagctcc

SEQ ID NO: 6687 - DNA, 35 bp, Artificial Sequence
  Synthetic oligonucleotide
gactggacggatacgtacaaattggatccatcatg

SEQ ID NO: 6688 - DNA, 36 bp, Artificial Sequence
  Synthetic oligonucleotide
gagccgccaccatggactgcgttcaccatctataca

SEQ ID NO: 6689 - DNA, 37 bp, Artificial Sequence
  Synthetic oligonucleotide
ggtcacacaacgcgcccacgacggctaacgacttaga

SEQ ID NO: 6690 - DNA, 35 bp, Artificial Sequence
  Synthetic oligonucleotide
gtgcaaccagcggagcagaagctgtagaggcgttt

SEQ ID NO: 6691 - DNA, 38 bp, Artificial Sequence
  Synthetic oligonucleotide
tcacgcgcagtcttagttcaatccaaccgtccacttga

SEQ ID NO: 6692 - DNA, 37 bp, Artificial Sequence
  Synthetic oligonucleotide
tcgaacgcagatgtaatgcgatcatcacactggctga

SEQ ID NO: 6693 - DNA, 37 bp, Artificial Sequence
  Synthetic oligonucleotide
tgcgaagcaacaacggttatcatcgagatggagggga

SEQ ID NO: 6694 - DNA, 36 bp, Artificial Sequence
  Synthetic oligonucleotide
aaccgaggcgccgaagttatgcagagaaacagggca

SEQ ID NO: 6695 - DNA, 36 bp, Artificial Sequence
  Synthetic oligonucleotide
acatcccgaactggaattgtgcggtcactgggtgaa

SEQ ID NO: 6696 - DNA, 38 bp, Artificial Sequence
  Synthetic oligonucleotide
acccgcgaacatcgcgcactagtctacctgcctactga

SEQ ID NO: 6697 - DNA, 38 bp, Artificial Sequence
  Synthetic oligonucleotide
gacactgcctggccgaccgtcctagtcgaaaatcgtga

SEQ ID NO: 6698 - DNA, 37 bp, Artificial Sequence
  Synthetic oligonucleotide
gcacctcggtgtagccggcgcacacgccagagaagga

SEQ ID NO: 6699 - DNA, 35 bp, Artificial Sequence
  Synthetic oligonucleotide
accgacgcgagggtaggaatttgggacagcaaagc

SEQ ID NO: 6700 - DNA, 37 bp, Artificial Sequence
  Synthetic oligonucleotide
acgacaaccagatcagaagctgttaaagcagaactca

SEQ ID NO: 6701 - DNA, 36 bp, Artificial Sequence
  Synthetic oligonucleotide
gatgaagctgtcagcctgtcatgcatcttcaacaaa

SEQ ID NO: 6702 - DNA, 35 bp, Artificial Sequence
  Synthetic oligonucleotide
gccacgaaagagggacgggtgctgacttcgaatga

SEQ ID NO: 6703 - DNA, 35 bp, Artificial Sequence
  Synthetic oligonucleotide
gcgaaaaccgcctgaactcgtgatctcgactttgt

SEQ ID NO: 6704 - DNA, 35 bp, Artificial Sequence
  Synthetic oligonucleotide
gtgaacccgtctagctgtatgtgtgcccaacttct

SEQ ID NO: 6705 - DNA, 35 bp, Artificial Sequence
  Synthetic oligonucleotide
tacgcaaccggtgcgtatccgtagaaaggacatcg

SEQ ID NO: 6706 - DNA, 35 bp, Artificial Sequence
  Synthetic oligonucleotide
tatgcatgggggaacgcggtgtaggtccttaggtg

SEQ ID NO: 6707 - DNA, 36 bp, Artificial Sequence
  Synthetic oligonucleotide
atggagggtcagacccccagacctttccaacctcga

SEQ ID NO: 6708 - DNA, 35 bp, Artificial Sequence
  Synthetic oligonucleotide
gaacaacagtcaagtgactataaacatgtgtaagg

SEQ ID NO: 6709 - DNA, 37 bp, Artificial Sequence
  Synthetic oligonucleotide
gcaacccgccacactacacgagaggcctccctatcga

SEQ ID NO: 6710 - DNA, 36 bp, Artificial Sequence
  Synthetic oligonucleotide
gccaacgtacacccgaacgtactcgaagttgtcgca

SEQ ID NO: 6711 - DNA, 36 bp, Artificial Sequence
  Synthetic oligonucleotide
taccacgtcgggcgatacatccactggcctactaaa

SEQ ID NO: 6712 - DNA, 35 bp, Artificial Sequence
  Synthetic oligonucleotide
tcacatgcggatacatgttgttcgctgccactcct

SEQ ID NO: 6713 - DNA, 36 bp, Artificial Sequence
  Synthetic oligonucleotide
tccggtcgtaggcccaccatgacactatcccaataa

SEQ ID NO: 6714 - DNA, 37 bp, Artificial Sequence
  Synthetic oligonucleotide
tctgcggagcgcaccttatttcggagcacgcgtgtga

SEQ ID NO: 6715 - DNA, 37 bp, Artificial Sequence
  Synthetic oligonucleotide
tgccgaccacactccacatcgaccaccttccacggga

SEQ ID NO: 6716 - DNA, 38 bp, Artificial Sequence
  Synthetic oligonucleotide
tgcgacgacgtaagtcacgactggtgtaatgattttga

SEQ ID NO: 6717 - DNA, 37 bp, Artificial Sequence
  Synthetic oligonucleotide
acacatgctcggctaatggaggtaaggacgtttttga

SEQ ID NO: 6718 - DNA, 34 bp, Artificial Sequence
  Synthetic oligonucleotide
acatccgagcccacgacattagaacccattacgg

SEQ ID NO: 6719 - DNA, 37 bp, Artificial Sequence
  Synthetic oligonucleotide
accaccgccaagtcggtaaacattgggatgtttacga

SEQ ID NO: 6720 - DNA, 35 bp, Artificial Sequence
  Synthetic oligonucleotide
atgcaccacagctgttagaaggcgcgttagtccac

SEQ ID NO: 6721 - DNA, 35 bp, Artificial Sequence
  Synthetic oligonucleotide
gactgggcgggagggtgtagggtagtagatcgcgg

SEQ ID NO: 6722 - DNA, 35 bp, Artificial Sequence
  Synthetic oligonucleotide
tgacggtgagcgcccaacgtatggtaacgtatgcc

SEQ ID NO: 6723 - DNA, 36 bp, Artificial Sequence
  Synthetic oligonucleotide
aacccgcaagtagtacggtacagaggtcatgtttta

SEQ ID NO: 6724 - DNA, 35 bp, Artificial Sequence
  Synthetic oligonucleotide
acaacccgggggccgtaagttcaacgctacagagt

SEQ ID NO: 6725 - DNA, 37 bp, Artificial Sequence
  Synthetic oligonucleotide
acctgaccccgcatacgactataagtcgtacttttga

SEQ ID NO: 6726 - DNA, 36 bp, Artificial Sequence
  Synthetic oligonucleotide
gaacacgaaccagagccccacacactgaccctgcaa

SEQ ID NO: 6727 - DNA, 37 bp, Artificial Sequence
  Synthetic oligonucleotide
gaccaagtcacgctccggggtaatcccaattacctga

SEQ ID NO: 6728 - DNA, 35 bp, Artificial Sequence
  Synthetic oligonucleotide
gacccgtaacggtactcgcaggcaccaccacaagc

SEQ ID NO: 6729 - DNA, 37 bp, Artificial Sequence
  Synthetic oligonucleotide
gacgcacgtcgaggtttccctaaactactctttcgga

SEQ ID NO: 6730 - DNA, 38 bp, Artificial Sequence
  Synthetic oligonucleotide
gatgcgccacagtatagggaataccgggtcagatttga

SEQ ID NO: 6731 - DNA, 35 bp, Artificial Sequence
  Synthetic oligonucleotide
gcacaacggctgaccccgaagaccaaccctgcata

SEQ ID NO: 6732 - DNA, 36 bp, Artificial Sequence
  Synthetic oligonucleotide
gcagtgcacgcggaccctactcgacctactctggca

SEQ ID NO: 6733 - DNA, 36 bp, Artificial Sequence
  Synthetic oligonucleotide
tcacgccgagtgaacgtcttcgcccatatttcacga

SEQ ID NO: 6734 - DNA, 35 bp, Artificial Sequence
  Synthetic oligonucleotide
gacgccgaacaaggtgcttagacaataatgaacac

SEQ ID NO: 6735 - DNA, 35 bp, Artificial Sequence
  Synthetic oligonucleotide
gatgcgcagatgccgccgctaagtgggcgctcccc

SEQ ID NO: 6736 - DNA, 36 bp, Artificial Sequence
  Synthetic oligonucleotide
gcacatcactactaagaccgatgcaccctgggtaca

SEQ ID NO: 6737 - DNA, 36 bp, Artificial Sequence
  Synthetic oligonucleotide
gcgaaactccggtatggaacccggtggtgcaggtta

SEQ ID NO: 6738 - DNA, 37 bp, Artificial Sequence
  Synthetic oligonucleotide
gctgcactccaccgtgacagagatgtcacgtctccga

SEQ ID NO: 6739 - DNA, 35 bp, Artificial Sequence
  Synthetic oligonucleotide
tgcgcaagacatgcagccacaaccccagtaatccc

SEQ ID NO: 6740 - DNA, 36 bp, Artificial Sequence
  Synthetic oligonucleotide
aacgcacgccagttggtacgcggtaggtgttgtgca

SEQ ID NO: 6741 - DNA, 37 bp, Artificial Sequence
  Synthetic oligonucleotide
acacacgcgagtcgagcacaggtggcctacccaaaga

SEQ ID NO: 6742 - DNA, 35 bp, Artificial Sequence
  Synthetic oligonucleotide
acaccaatcagccatcgccgcgagttagcaccact

SEQ ID NO: 6743 - DNA, 36 bp, Artificial Sequence
  Synthetic oligonucleotide
gacacggacgagagcgagaaggtctgggggacgata

SEQ ID NO: 6744 - DNA, 37 bp, Artificial Sequence
  Synthetic oligonucleotide
gcgagactgcctgtgttacgctagagggtgggctgga

SEQ ID NO: 6745 - DNA, 35 bp, Artificial Sequence
  Synthetic oligonucleotide
gtgcgtgccggtcgtatgaagatcgctcacctgtc

SEQ ID NO: 6746 - DNA, 37 bp, Artificial Sequence
  Synthetic oligonucleotide
tacgccaagcatcagttagaagcgatcagatggaaga

SEQ ID NO: 6747 - DNA, 36 bp, Artificial Sequence
  Synthetic oligonucleotide
tacgtgcgggtccggaacagtgacaatcagcagata

SEQ ID NO: 6748 - DNA, 35 bp, Artificial Sequence
  Synthetic oligonucleotide
tgcccgggagtgggctcggggcaatacgggtgggc

SEQ ID NO: 6749 - DNA, 36 bp, Artificial Sequence
  Synthetic oligonucleotide
acataccgctcgccggagatagtgtcaggatgccaa

SEQ ID NO: 6750 - DNA, 37 bp, Artificial Sequence
  Synthetic oligonucleotide
atgccgaagcaggtgacaagtgagtcttcgtacctga

SEQ ID NO: 6751 - DNA, 38 bp, Artificial Sequence
  Synthetic oligonucleotide
gaacaccagtctgtagtaaatgtcttagcattcggtga

SEQ ID NO: 6752 - DNA, 36 bp, Artificial Sequence
  Synthetic oligonucleotide
gacgtaccgtagcaagtactgcggtgcatcaccgaa

SEQ ID NO: 6753 - DNA, 31 bp, Artificial Sequence
  Synthetic oligonucleotide
gcacatccatgctcttgcatcactgttctga

SEQ ID NO: 6754 - DNA, 35 bp, Artificial Sequence
  Synthetic oligonucleotide
gcgaagcaccaccataggatcagagcctagcttgt

SEQ ID NO: 6755 - DNA, 37 bp, Artificial Sequence
  Synthetic oligonucleotide
tacgaacacagcccatacagcaagtattagttacgga

SEQ ID NO: 6756 - DNA, 35 bp, Artificial Sequence
  Synthetic oligonucleotide
tcacacgcacggtcgtaccaaagaacgcggtagca

SEQ ID NO: 6757 - DNA, 35 bp, Artificial Sequence
  Synthetic oligonucleotide
ttgtgcggtccatgcacgccatatgcaggtttgca

SEQ ID NO: 6758 - DNA, 36 bp, Artificial Sequence
  Synthetic oligonucleotide
aaccgcaagggagacctcggtttgcgaccaattgca

SEQ ID NO: 6759 - DNA, 36 bp, Artificial Sequence
  Synthetic oligonucleotide
aacgtgagcacggggatgaggacggatacgtcgaga

SEQ ID NO: 6760 - DNA, 38 bp, Artificial Sequence
  Synthetic oligonucleotide
cgaccgcatgtgagcttacctgtgcttcttcagtatga

SEQ ID NO: 6761 - DNA, 35 bp, Artificial Sequence
  Synthetic oligonucleotide
gaccccagtctgacccactgcggcaagacacttta

SEQ ID NO: 6762 - DNA, 36 bp, Artificial Sequence
  Synthetic oligonucleotide
gaccgagggatcggcactacggttaggcatgtgcta

SEQ ID NO: 6763 - DNA, 34 bp, Artificial Sequence
  Synthetic oligonucleotide
gaccgcccaatgctaggaagcccgccctccgtcc

SEQ ID NO: 6764 - DNA, 35 bp, Artificial Sequence
  Synthetic oligonucleotide
gaggatcgcaagcttgtcagacccccagacctcag

SEQ ID NO: 6765 - DNA, 35 bp, Artificial Sequence
  Synthetic oligonucleotide
gagtcagaacgccggtcggtccaaactacgccaat

SEQ ID NO: 6766 - DNA, 36 bp, Artificial Sequence
  Synthetic oligonucleotide
gatcgaacacgccccagcaatgcgataacccgggcc

SEQ ID NO: 6767 - DNA, 35 bp, Artificial Sequence
  Synthetic oligonucleotide
tcccacaccaccagcagaacgtctgcgatagcgaa

SEQ ID NO: 6768 - DNA, 37 bp, Artificial Sequence
  Synthetic oligonucleotide
atgacagaccagcctggtatttcgggagtcgaaggga

SEQ ID NO: 6769 - DNA, 35 bp, Artificial Sequence
  Synthetic oligonucleotide
gcaaacgcgcacattcaacgcccagccgcccacct

SEQ ID NO: 6770 - DNA, 35 bp, Artificial Sequence
  Synthetic oligonucleotide
gcatgcccgacgtaaagtacaaaaaccctaggcta

SEQ ID NO: 6771 - DNA, 37 bp, Artificial Sequence
  Synthetic oligonucleotide
gcgacgagcagtcggacgattctgcgaggttcgaaga

SEQ ID NO: 6772 - DNA, 36 bp, Artificial Sequence
  Synthetic oligonucleotide
gctgctgcgtgtccagacccccagactcacacatga

SEQ ID NO: 6773 - DNA, 36 bp, Artificial Sequence
  Synthetic oligonucleotide
tcacgcatgggggaggtggttaacggcgtggacgta

SEQ ID NO: 6774 - DNA, 36 bp, Artificial Sequence
  Synthetic oligonucleotide
tcagacaccgggtgcctagggaacaagtcatcgtca

SEQ ID NO: 6775 - DNA, 35 bp, Artificial Sequence
  Synthetic oligonucleotide
tcctactagcccggaccccgccacgactacagacc

SEQ ID NO: 6776 - DNA, 36 bp, Artificial Sequence
  Synthetic oligonucleotide
tgcaacccccctagaagaaggaggctaagcacatta

SEQ ID NO: 6777 - DNA, 35 bp, Artificial Sequence
  Synthetic oligonucleotide
aacgaacggacgggataagtactttagacgaggac

SEQ ID NO: 6778 - DNA, 36 bp, Artificial Sequence
  Synthetic oligonucleotide
acacgccgtggactgagcgggaggttccgcgtacta

SEQ ID NO: 6779 - DNA, 37 bp, Artificial Sequence
  Synthetic oligonucleotide
gacacacgttacggatatattggcagttacctcgaga

SEQ ID NO: 6780 - DNA, 36 bp, Artificial Sequence
  Synthetic oligonucleotide
gtggtccgccagtcccccaggagtggttctcttgca

SEQ ID NO: 6781 - DNA, 35 bp, Artificial Sequence
  Synthetic oligonucleotide
gtggtcgccaacgataattttgtgcaggaaagccg

SEQ ID NO: 6782 - DNA, 35 bp, Artificial Sequence
  Synthetic oligonucleotide
tacgccgaaccagttatgccatggtatgcgtgccc

SEQ ID NO: 6783 - DNA, 36 bp, Artificial Sequence
  Synthetic oligonucleotide
tacgcgcaacagtcgcggcataggagaggtactata

SEQ ID NO: 6784 - DNA, 38 bp, Artificial Sequence
  Synthetic oligonucleotide
tgacatgccctcagtcgtgcccaccgtgtgtagactga

SEQ ID NO: 6785 - DNA, 36 bp, Artificial Sequence
  Synthetic oligonucleotide
tgagcgaccacacgcaatgaagacgtaatcagggga

SEQ ID NO: 6786 - DNA, 36 bp, Artificial Sequence
  Synthetic oligonucleotide
tgtgggtcggggcgtattgccgtacgttgtgttaaa

SEQ ID NO: 6787 - DNA, 36 bp, Artificial Sequence
  Synthetic oligonucleotide
ttgggcaccagaacggtgaagtactgctactcacta

SEQ ID NO: 6788 - DNA, 38 bp, Artificial Sequence
  Synthetic oligonucleotide
aacacgcgcaaggcatccgtaccgcctgagtcctttga

SEQ ID NO: 6789 - DNA, 36 bp, Artificial Sequence
  Synthetic oligonucleotide
acatcgcacaccaaacatgtttgtacagcagcaaca

SEQ ID NO: 6790 - DNA, 37 bp, Artificial Sequence
  Synthetic oligonucleotide
gacccgaagcaataagctaggcgtttcgaaataacga

SEQ ID NO: 6791 - DNA, 36 bp, Artificial Sequence
  Synthetic oligonucleotide
gccgagggtcggaacgtagacgctgtggaagtgtga

SEQ ID NO: 6792 - DNA, 38 bp, Artificial Sequence
  Synthetic oligonucleotide
gccgcccgcacagaacggactaactgtggaccagttga

SEQ ID NO: 6793 - DNA, 37 bp, Artificial Sequence
  Synthetic oligonucleotide
gtgctgccgtagagagtatgacgctatcaagttggga

SEQ ID NO: 6794 - DNA, 35 bp, Artificial Sequence
  Synthetic oligonucleotide
taactgcatccgcctacacttgaccccgctactac

SEQ ID NO: 6795 - DNA, 38 bp, Artificial Sequence
  Synthetic oligonucleotide
tcacggatgacgcccgagtacttacaggatagccttga

SEQ ID NO: 6796 - DNA, 38 bp, Artificial Sequence
  Synthetic oligonucleotide
tgcgggtgggtcgggatgggctacaatcggctgactga

SEQ ID NO: 6797 - DNA, 38 bp, Artificial Sequence
  Synthetic oligonucleotide
acattccggcctcccgtcgattgtatcagtgaccctga

SEQ ID NO: 6798 - DNA, 35 bp, Artificial Sequence
  Synthetic oligonucleotide
atgcccacgggttagacgtccctgcctgagactca

SEQ ID NO: 6799 - DNA, 38 bp, Artificial Sequence
  Synthetic oligonucleotide
catgggcgatagggcgcagggaactcgagaagttgtga

SEQ ID NO: 6800 - DNA, 38 bp, Artificial Sequence
  Synthetic oligonucleotide
gaaccacggactcatactgagacatcgctgtgccctga

SEQ ID NO: 6801 - DNA, 35 bp, Artificial Sequence
  Synthetic oligonucleotide
gacacaggaagccctggggttttctactgcaactc

SEQ ID NO: 6802 - DNA, 35 bp, Artificial Sequence
  Synthetic oligonucleotide
gacacgacagaattctgacgcagattcggtagaca

SEQ ID NO: 6803 - DNA, 36 bp, Artificial Sequence
  Synthetic oligonucleotide
gagtcggggtgcgaggtacgatgaccacatatctga

SEQ ID NO: 6804 - DNA, 37 bp, Artificial Sequence
  Synthetic oligonucleotide
gcaccccgccacgacagtattttcttaccaaccccga

SEQ ID NO: 6805 - DNA, 36 bp, Artificial Sequence
  Synthetic oligonucleotide
gtgacgggcgagtcggaaaccatcaaaaacacaaga

SEQ ID NO: 6806 - DNA, 35 bp, Artificial Sequence
  Synthetic oligonucleotide
gttgccgcagagtgcgaaatgtcgcacgctaacac

SEQ ID NO: 6807 - DNA, 38 bp, Artificial Sequence
  Synthetic oligonucleotide
tagtgctgcagaccgtaacgctggtgcaattcgtatga

SEQ ID NO: 6808 - DNA, 37 bp, Artificial Sequence
  Synthetic oligonucleotide
aagtgctgcaaaggggtaatcacgtccacacttctga

SEQ ID NO: 6809 - DNA, 37 bp, Artificial Sequence
  Synthetic oligonucleotide
acacccgcagaactcacgtgacgacactactcaggga

SEQ ID NO: 6810 - DNA, 35 bp, Artificial Sequence
  Synthetic oligonucleotide
acacgcaccatcctaccactagtcctaccgtcgtg

SEQ ID NO: 6811 - DNA, 35 bp, Artificial Sequence
  Synthetic oligonucleotide
accaccaagaactgcctgctactgccatcatgatc

SEQ ID NO: 6812 - DNA, 36 bp, Artificial Sequence
  Synthetic oligonucleotide
gaactgaccccgaagactgcacccggcccttctgca

SEQ ID NO: 6813 - DNA, 37 bp, Artificial Sequence
  Synthetic oligonucleotide
gacacatcagtggcgtgattttttccatccgaacgga

SEQ ID NO: 6814 - DNA, 38 bp, Artificial Sequence
  Synthetic oligonucleotide
gacacgttgccacttcttgcagacactcaagccactga

SEQ ID NO: 6815 - DNA, 37 bp, Artificial Sequence
  Synthetic oligonucleotide
gacgacgctgtactggtgtagagcaacggatctagga

SEQ ID NO: 6816 - DNA, 36 bp, Artificial Sequence
  Synthetic oligonucleotide
gacgggtcggaggggtgggttataggtggctccgaa

SEQ ID NO: 6817 - DNA, 37 bp, Artificial Sequence
  Synthetic oligonucleotide
gcactcaccggagactgtgacgactttacacgactga

SEQ ID NO: 6818 - DNA, 36 bp, Artificial Sequence
  Synthetic oligonucleotide
gtggccgaccggggatgtgtatcacggatgctataa

SEQ ID NO: 6819 - DNA, 35 bp, Artificial Sequence
  Synthetic oligonucleotide
gttgaccccactcctcattatccagtgcagacagg

SEQ ID NO: 6820 - DNA, 36 bp, Artificial Sequence
  Synthetic oligonucleotide
tcaaaccgctcgggtgacctgacagtcggaaagtca

SEQ ID NO: 6821 - DNA, 36 bp, Artificial Sequence
  Synthetic oligonucleotide
cgatcaaaggccgggcactggatgggtatttgataa

SEQ ID NO: 6822 - DNA, 37 bp, Artificial Sequence
  Synthetic oligonucleotide
gatgctcgcgaagtgcgcaacccttgacgtccccaga

SEQ ID NO: 6823 - DNA, 36 bp, Artificial Sequence
  Synthetic oligonucleotide
gcaacatccgtcatcgcgatcggggttctaggtgaa

SEQ ID NO: 6824 - DNA, 35 bp, Artificial Sequence
  Synthetic oligonucleotide
gcatgcccagcctctactaaagcccatttccctct

SEQ ID NO: 6825 - DNA, 38 bp, Artificial Sequence
  Synthetic oligonucleotide
gcatgccgcgtaagtgcgatatagtatggccgttgtga

SEQ ID NO: 6826 - DNA, 38 bp, Artificial Sequence
  Synthetic oligonucleotide
gccaaacctcaagttggaagacaggcgatccacaatga

SEQ ID NO: 6827 - DNA, 38 bp, Artificial Sequence
  Synthetic oligonucleotide
gccacacagctggcaagggtgagcacactgaaaagtga

SEQ ID NO: 6828 - DNA, 35 bp, Artificial Sequence
  Synthetic oligonucleotide
gtgccccatccgcatgttcagtctgatatgttgta

SEQ ID NO: 6829 - DNA, 37 bp, Artificial Sequence
  Synthetic oligonucleotide
gttgaaaccgacgagcttgaaagggccgacataggga

SEQ ID NO: 6830 - DNA, 38 bp, Artificial Sequence
  Synthetic oligonucleotide
tccaagcgcgggcactcttagtcgtgaagctgatgtga

SEQ ID NO: 6831 - DNA, 38 bp, Artificial Sequence
  Synthetic oligonucleotide
tgaacgatcagtaggtgatgcggacacgttgactgtga

SEQ ID NO: 6832 - DNA, 37 bp, Artificial Sequence
  Synthetic oligonucleotide
aatgcggacggagcatgcgcataaactaccagaggga

SEQ ID NO: 6833 - DNA, 38 bp, Artificial Sequence
  Synthetic oligonucleotide
acaacaacaacagctgggcgtggaggctccgtgagtga

SEQ ID NO: 6834 - DNA, 36 bp, Artificial Sequence
  Synthetic oligonucleotide
atgagccgggcgcaaggtacgatcgaaagcgtgaaa

SEQ ID NO: 6835 - DNA, 36 bp, Artificial Sequence
  Synthetic oligonucleotide
gacgaccagatatctcaacatactgcccgcccatga

SEQ ID NO: 6836 - DNA, 35 bp, Artificial Sequence
  Synthetic oligonucleotide
gactagcccagccaattcttaccacactccgacgc

SEQ ID NO: 6837 - DNA, 38 bp, Artificial Sequence
  Synthetic oligonucleotide
gagtcgccgaacggacgaacgaagcgcctacaccatga

SEQ ID NO: 6838 - DNA, 36 bp, Artificial Sequence
  Synthetic oligonucleotide
gcaacacccatcatgttagagacccccttggaagga

SEQ ID NO: 6839 - DNA, 38 bp, Artificial Sequence
  Synthetic oligonucleotide
gttgacagtaggtggatattggactgcatgtgtggtga

SEQ ID NO: 6840 - DNA, 37 bp, Artificial Sequence
  Synthetic oligonucleotide
tagacccacctgacagtgttcgtttccccaggaacga

SEQ ID NO: 6841 - DNA, 38 bp, Artificial Sequence
  Synthetic oligonucleotide
tcacatgcagtcagacgccacctgttcgtaactgatga

SEQ ID NO: 6842 - DNA, 35 bp, Artificial Sequence
  Synthetic oligonucleotide
tgcacaccacccgtatcacacgttactttccgagg

SEQ ID NO: 6843 - DNA, 35 bp, Artificial Sequence
  Synthetic oligonucleotide
tgcgaccggtagggagaccccggtgtcctatgaat

SEQ ID NO: 6844 - DNA, 36 bp, Artificial Sequence
  Synthetic oligonucleotide
aatgtgcagcagccactaacttttttagacatccta

SEQ ID NO: 6845 - DNA, 35 bp, Artificial Sequence
  Synthetic oligonucleotide
atgtaccgccacccaccattatccttaacacctga

SEQ ID NO: 6846 - DNA, 38 bp, Artificial Sequence
  Synthetic oligonucleotide
gacgcgaaccacctgaccccgatacgacaatggagtga

SEQ ID NO: 6847 - DNA, 38 bp, Artificial Sequence
  Synthetic oligonucleotide
gaggacacaggacagaggtacaagactagacgtgctga

SEQ ID NO: 6848 - DNA, 35 bp, Artificial Sequence
  Synthetic oligonucleotide
gtcccaacaactgagtaatcgatgcacagttcaaa

SEQ ID NO: 6849 - DNA, 35 bp, Artificial Sequence
  Synthetic oligonucleotide
tacaccatcgcactctgtgttagtcacgggactac

SEQ ID NO: 6850 - DNA, 36 bp, Artificial Sequence
  Synthetic oligonucleotide
accaacgacaataacagggggtacgagtccaacgta

SEQ ID NO: 6851 - DNA, 37 bp, Artificial Sequence
  Synthetic oligonucleotide
agcgggccactgaccccgtataatcttaacttcccga

SEQ ID NO: 6852 - DNA, 37 bp, Artificial Sequence
  Synthetic oligonucleotide
gacgcagtcaagggatgtgagcgaggcactggtgaga

SEQ ID NO: 6853 - DNA, 35 bp, Artificial Sequence
  Synthetic oligonucleotide
gatgactgagcgaaaactgaaggagtaacgccacg

SEQ ID NO: 6854 - DNA, 35 bp, Artificial Sequence
  Synthetic oligonucleotide
gatgcgacagtttccacactccggcacaccagtag

SEQ ID NO: 6855 - DNA, 37 bp, Artificial Sequence
  Synthetic oligonucleotide
ttcaccgcagggaattaggacctgagagatggtgaga

SEQ ID NO: 6856 - DNA, 38 bp, Artificial Sequence
  Synthetic oligonucleotide
acacgcggtccgacggttaaagccgtaagctctagtga

SEQ ID NO: 6857 - DNA, 38 bp, Artificial Sequence
  Synthetic oligonucleotide
acccaagcggacgagtgttcaaacggtaccgatcatga

SEQ ID NO: 6858 - DNA, 34 bp, Artificial Sequence
  Synthetic oligonucleotide
atcacaccccgccaattggaagcttggaggcctt

SEQ ID NO: 6859 - DNA, 35 bp, Artificial Sequence
  Synthetic oligonucleotide
atgacgcggccaccacgaatccgtcgacgagctgg

SEQ ID NO: 6860 - DNA, 38 bp, Artificial Sequence
  Synthetic oligonucleotide
gcaccaccagtctgcgttgacagtcgctgacctactga

SEQ ID NO: 6861 - DNA, 37 bp, Artificial Sequence
  Synthetic oligonucleotide
gctcacatgcaatccctggcataaagccggacgacga

SEQ ID NO: 6862 - DNA, 37 bp, Artificial Sequence
  Synthetic oligonucleotide
ggagacgccggttactacgaggctggaggttagttga

SEQ ID NO: 6863 - DNA, 38 bp, Artificial Sequence
  Synthetic oligonucleotide
tcaaccacacgaatgaaccccgaacataccggaggtga

SEQ ID NO: 6864 - DNA, 38 bp, Artificial Sequence
  Synthetic oligonucleotide
tccaagcgaacacgtttgaccactgaccccgttcttga

SEQ ID NO: 6865 - DNA, 36 bp, Artificial Sequence
  Synthetic oligonucleotide
tccacacatgcggtactcgagcattgtaggctcaaa

SEQ ID NO: 6866 - DNA, 35 bp, Artificial Sequence
  Synthetic oligonucleotide
accgacgggaaggtaagaggcattgatagttgttg

SEQ ID NO: 6867 - DNA, 35 bp, Artificial Sequence
  Synthetic oligonucleotide
gacaccagcacacagtatgagatggacaaccctgc

SEQ ID NO: 6868 - DNA, 38 bp, Artificial Sequence
  Synthetic oligonucleotide
gacaccgcagaccgtcattaaggcctgactggtggtga

SEQ ID NO: 6869 - DNA, 36 bp, Artificial Sequence
  Synthetic oligonucleotide
gacgcagtaagcggtacgtctaatccatataaatca

SEQ ID NO: 6870 - DNA, 37 bp, Artificial Sequence
  Synthetic oligonucleotide
gacgtggcacagagggcgcagtcattccgaatagtga

SEQ ID NO: 6871 - DNA, 35 bp, Artificial Sequence
  Synthetic oligonucleotide
gccctgccgccgactatctactgacccctcaatcc

SEQ ID NO: 6872 - DNA, 35 bp, Artificial Sequence
  Synthetic oligonucleotide
tcatcacgcagtatacagttacctcggttaagctt

SEQ ID NO: 6873 - DNA, 38 bp, Artificial Sequence
  Synthetic oligonucleotide
ttaaccgccccatcgatctcgtgcacatgtaagtgtga

SEQ ID NO: 6874 - DNA, 35 bp, Artificial Sequence
  Synthetic oligonucleotide
aagtacgcgcgggggtatatgagggatgtatcgag

SEQ ID NO: 6875 - DNA, 35 bp, Artificial Sequence
  Synthetic oligonucleotide
aatgcgcaactggggcgttcctgcggattgctacc

SEQ ID NO: 6876 - DNA, 35 bp, Artificial Sequence
  Synthetic oligonucleotide
acgcgctcaccccctgacagttacgaaaggcttca

SEQ ID NO: 6877 - DNA, 35 bp, Artificial Sequence
  Synthetic oligonucleotide
cacacccaccctatatgaccgaccagcacccagtt

SEQ ID NO: 6878 - DNA, 35 bp, Artificial Sequence
  Synthetic oligonucleotide
gacacgacctggtaggaacagtcgtttatcaccaa

SEQ ID NO: 6879 - DNA, 37 bp, Artificial Sequence
  Synthetic oligonucleotide
gacggaggacgtcgtatctgctggttgttacaatgga

SEQ ID NO: 6880 - DNA, 35 bp, Artificial Sequence
  Synthetic oligonucleotide
gcagacgcacacgaacgatccagcaggtggtaaat

SEQ ID NO: 6881 - DNA, 38 bp, Artificial Sequence
  Synthetic oligonucleotide
gcccactgcaagacgtccatgcagttcgcatctcttga

SEQ ID NO: 6882 - DNA, 37 bp, Artificial Sequence
  Synthetic oligonucleotide
gtcacccccgaaatctatctccgctacctgggctcga

SEQ ID NO: 6883 - DNA, 35 bp, Artificial Sequence
  Synthetic oligonucleotide
gtgaagccatcacgcgtgacaacctctgcacagtg

SEQ ID NO: 6884 - DNA, 37 bp, Artificial Sequence
  Synthetic oligonucleotide
gtggaacggctgtgacaccaacagcgagcaatgtcga

SEQ ID NO: 6885 - DNA, 35 bp, Artificial Sequence
  Synthetic oligonucleotide
tccacacccaccagtagtttccacgtgtctcgttc

SEQ ID NO: 6886 - DNA, 37 bp, Artificial Sequence
  Synthetic oligonucleotide
acagtcgaaatcaaggcccaatgttatggtaagacga

SEQ ID NO: 6887 - DNA, 36 bp, Artificial Sequence
  Synthetic oligonucleotide
acgagccggcgaccgacgcgtgtcacaaactgttga

SEQ ID NO: 6888 - DNA, 36 bp, Artificial Sequence
  Synthetic oligonucleotide
atcgcctgggacgagcgtaggcacaatgttaacaca

SEQ ID NO: 6889 - DNA, 35 bp, Artificial Sequence
  Synthetic oligonucleotide
atgtaccgcagctagtgacaccctagcctttaatg

SEQ ID NO: 6890 - DNA, 38 bp, Artificial Sequence
  Synthetic oligonucleotide
gccaaggtgggatacgatacactcacgaacgccactga

SEQ ID NO: 6891 - DNA, 35 bp, Artificial Sequence
  Synthetic oligonucleotide
aacaagcccagtggatcagtcatgcatatcggtcc

SEQ ID NO: 6892 - DNA, 38 bp, Artificial Sequence
  Synthetic oligonucleotide
accacaccccgaaagtgttaaaagcaagccgaagctga

SEQ ID NO: 6893 - DNA, 37 bp, Artificial Sequence
  Synthetic oligonucleotide
agcacggacggcatgattctttctcacatacaaccga

SEQ ID NO: 6894 - DNA, 35 bp, Artificial Sequence
  Synthetic oligonucleotide
agcgaagacccccagacagttggtgccaaggaaat

SEQ ID NO: 6895 - DNA, 36 bp, Artificial Sequence
  Synthetic oligonucleotide
atgccagagcgggcttgcttaatatcgccacatcga

SEQ ID NO: 6896 - DNA, 35 bp, Artificial Sequence
  Synthetic oligonucleotide
gacaaacgcatgagtgtccttaccgcctttacaca

SEQ ID NO: 6897 - DNA, 35 bp, Artificial Sequence
  Synthetic oligonucleotide
gacgacaccaggcgggcgataagggaagccaacgt

SEQ ID NO: 6898 - DNA, 38 bp, Artificial Sequence
  Synthetic oligonucleotide
gacgacccgtccctcaaactgcatagaaaccgtcatga

SEQ ID NO: 6899 - DNA, 35 bp, Artificial Sequence
  Synthetic oligonucleotide
gactgggcccacacttgacaccgtagatatgatca

SEQ ID NO: 6900 - DNA, 36 bp, Artificial Sequence
  Synthetic oligonucleotide
gatgcagacggctgattcccaagtcacaacaaatgg

SEQ ID NO: 6901 - DNA, 36 bp, Artificial Sequence
  Synthetic oligonucleotide
gcaccacaaggcgtatcgtaagctctgctatcgcga

SEQ ID NO: 6902 - DNA, 36 bp, Artificial Sequence
  Synthetic oligonucleotide
gcacgtctacgggcacgcgaagatttttgctcaaaa

SEQ ID NO: 6903 - DNA, 38 bp, Artificial Sequence
  Synthetic oligonucleotide
gccacctgaggagtggaacggactttacctcgttatga

SEQ ID NO: 6904 - DNA, 37 bp, Artificial Sequence
  Synthetic oligonucleotide
gtacaaccgcaggaagagtctactgggctactgatga

SEQ ID NO: 6905 - DNA, 35 bp, Artificial Sequence
  Synthetic oligonucleotide
tcgtggccgaccgtgatgacaaggttgcgttatcc

SEQ ID NO: 6906 - DNA, 36 bp, Artificial Sequence
  Synthetic oligonucleotide
tgactagcaggcgcatcgttcccgtgcacaccgaaa

SEQ ID NO: 6907 - DNA, 35 bp, Artificial Sequence
  Synthetic oligonucleotide
tgggccatccgtagccatcatgatgctccgatctt

SEQ ID NO: 6908 - DNA, 37 bp, Artificial Sequence
  Synthetic oligonucleotide
accaacccacaggtaatagcgacttgaacagcgaaga

SEQ ID NO: 6909 - DNA, 37 bp, Artificial Sequence
  Synthetic oligonucleotide
gacgagtgatcatagtgcttctcaagagtcgcgtcga

SEQ ID NO: 6910 - DNA, 36 bp, Artificial Sequence
  Synthetic oligonucleotide
gacgcagttcgaagtaactgtctgtgattcccgaca

SEQ ID NO: 6911 - DNA, 35 bp, Artificial Sequence
  Synthetic oligonucleotide
gcacagggtactgagcctagtccgtgtgtcgtcct

SEQ ID NO: 6912 - DNA, 36 bp, Artificial Sequence
  Synthetic oligonucleotide
gccaggccacgacaagatgagcaataggacactcga

SEQ ID NO: 6913 - DNA, 38 bp, Artificial Sequence
  Synthetic oligonucleotide
gcgaaacgacatccatcctgcagacataaataaattga

SEQ ID NO: 6914 - DNA, 35 bp, Artificial Sequence
  Synthetic oligonucleotide
aacgtcacccccccccgttcagacagtagcaatat

SEQ ID NO: 6915 - DNA, 37 bp, Artificial Sequence
  Synthetic oligonucleotide
accagtgcacacgcagctagctttgagtgcttattga

SEQ ID NO: 6916 - DNA, 38 bp, Artificial Sequence
  Synthetic oligonucleotide
atcataggccgactcccacggaaagaccccagtattga

SEQ ID NO: 6917 - DNA, 36 bp, Artificial Sequence
  Synthetic oligonucleotide
gatagccgcacgcattggaaagcacaacgtctcgca

SEQ ID NO: 6918 - DNA, 36 bp, Artificial Sequence
  Synthetic oligonucleotide
gcgcgagcaggcgcagtccccaaatcagtcatggaa

SEQ ID NO: 6919 - DNA, 38 bp, Artificial Sequence
  Synthetic oligonucleotide
gtcgcaaacgggaaaagacacagtcggaaacacgatga

SEQ ID NO: 6920 - DNA, 35 bp, Artificial Sequence
  Synthetic oligonucleotide
tcagccgggcaagtgtacattgaagggggaacggg

SEQ ID NO: 6921 - DNA, 35 bp, Artificial Sequence
  Synthetic oligonucleotide
tccgtgccgaaggtgaggaacgacagacactagtc

SEQ ID NO: 6922 - DNA, 37 bp, Artificial Sequence
  Synthetic oligonucleotide
tgacactcgcgcagacagttttaagtggtgtcaggga

SEQ ID NO: 6923 - DNA, 36 bp, Artificial Sequence
  Synthetic oligonucleotide
tgcaacaccatgcagcaacctacgcgcagtgagcca

SEQ ID NO: 6924 - DNA, 35 bp, Artificial Sequence
  Synthetic oligonucleotide
actgtcgggctgccgggcagataggcgtggaagat

SEQ ID NO: 6925 - DNA, 36 bp, Artificial Sequence
  Synthetic oligonucleotide
gacaaccccgagaaaccgtacgagccataagtatga

SEQ ID NO: 6926 - DNA, 38 bp, Artificial Sequence
  Synthetic oligonucleotide
gacgcacacgcaatcgtaattaatttgagcggaagtga

SEQ ID NO: 6927 - DNA, 36 bp, Artificial Sequence
  Synthetic oligonucleotide
gagcacatgaggcgcgacattggacttttcatgcta

SEQ ID NO: 6928 - DNA, 35 bp, Artificial Sequence
  Synthetic oligonucleotide
gcgcgagctcgcatcccaatgcacacccgcacatt

SEQ ID NO: 6929 - DNA, 37 bp, Artificial Sequence
  Synthetic oligonucleotide
gctcgcaccgcgaatgccagccattatacacccttga

SEQ ID NO: 6930 - DNA, 37 bp, Artificial Sequence
  Synthetic oligonucleotide
ggaccgacacgcgggacatagatactccgttgacaga

SEQ ID NO: 6931 - DNA, 36 bp, Artificial Sequence
  Synthetic oligonucleotide
gtgccagccaggagatacccagatttccgctatgta

SEQ ID NO: 6932 - DNA, 35 bp, Artificial Sequence
  Synthetic oligonucleotide
gtgccgatgccataggaacacgtaccctctcaaac

SEQ ID NO: 6933 - DNA, 38 bp, Artificial Sequence
  Synthetic oligonucleotide
gttgccccgagccttagtagtgaaagtcgtggaactga

SEQ ID NO: 6934 - DNA, 35 bp, Artificial Sequence
  Synthetic oligonucleotide
tacacagtcacaagcacggatgtggtttcaacact

SEQ ID NO: 6935 - DNA, 38 bp, Artificial Sequence
  Synthetic oligonucleotide
tagtgggcgtaggtaggattatggacgagacgggctga

SEQ ID NO: 6936 - DNA, 35 bp, Artificial Sequence
  Synthetic oligonucleotide
ttcagggggacgcgatgcttctggcacccctgggg

SEQ ID NO: 6937 - DNA, 35 bp, Artificial Sequence
  Synthetic oligonucleotide
acacaccgcctctgcccctacttatcgagagggcc

SEQ ID NO: 6938 - DNA, 35 bp, Artificial Sequence
  Synthetic oligonucleotide
accaacgccctcacgtcgcttcgaagccaactttt

SEQ ID NO: 6939 - DNA, 35 bp, Artificial Sequence
  Synthetic oligonucleotide
accgcgcagtaagcaatggcccatactcgttcctc

SEQ ID NO: 6940 - DNA, 36 bp, Artificial Sequence
  Synthetic oligonucleotide
atccacgccgtccaccttgcctacttattaccctca

SEQ ID NO: 6941 - DNA, 36 bp, Artificial Sequence
  Synthetic oligonucleotide
gatgctgcagattgggatcttggatcgtgacatgca

SEQ ID NO: 6942 - DNA, 36 bp, Artificial Sequence
  Synthetic oligonucleotide
gccaaggggcggttgggtaaaccgaaaccaaacgaa

SEQ ID NO: 6943 - DNA, 36 bp, Artificial Sequence
  Synthetic oligonucleotide
gtgcggtcacgtggagcatctcagcctatgatatca

SEQ ID NO: 6944 - DNA, 38 bp, Artificial Sequence
  Synthetic oligonucleotide
tgagaccgatccccgctggactacgcagtcatagctga

SEQ ID NO: 6945 - DNA, 36 bp, Artificial Sequence
  Synthetic oligonucleotide
tgccaacccagagggagaaaaaggaacgatcatcag

SEQ ID NO: 6946 - DNA, 36 bp, Artificial Sequence
  Synthetic oligonucleotide
tgcgaagcagcaagtgtacgaaacacttggaatata

SEQ ID NO: 6947 - DNA, 36 bp, Artificial Sequence
  Synthetic oligonucleotide
agcaccgcaaggggagcatattgtggtatcgaagta

SEQ ID NO: 6948 - DNA, 36 bp, Artificial Sequence
  Synthetic oligonucleotide
atgccgcaggtaccgaccaattcgaaattatgagaa

SEQ ID NO: 6949 - DNA, 36 bp, Artificial Sequence
  Synthetic oligonucleotide
gaccagcaatgctcattccctaccaaccgttgcaca

SEQ ID NO: 6950 - DNA, 38 bp, Artificial Sequence
  Synthetic oligonucleotide
gacgcacacggcgaccaaatacaggattatagtgatga

SEQ ID NO: 6951 - DNA, 35 bp, Artificial Sequence
  Synthetic oligonucleotide
gacgggagggggaatgtatatcagcaggttcggag

SEQ ID NO: 6952 - DNA, 35 bp, Artificial Sequence
  Synthetic oligonucleotide
gatcaacgacgccgaagcagtaggatgctggtgct

SEQ ID NO: 6953 - DNA, 37 bp, Artificial Sequence
  Synthetic oligonucleotide
gatgcccaaacagatgtgacaatgatgagaccgtaga

SEQ ID NO: 6954 - DNA, 36 bp, Artificial Sequence
  Synthetic oligonucleotide
gtcgaggggtcgaggagtttcgaaggatagtcatta

SEQ ID NO: 6955 - DNA, 35 bp, Artificial Sequence
  Synthetic oligonucleotide
tgacaccgctagcctccttaatcgcttgttggcta

SEQ ID NO: 6956 - DNA, 38 bp, Artificial Sequence
  Synthetic oligonucleotide
tgcacggagaagtgagtgtcgacagtcgtgcttcttga

SEQ ID NO: 6957 - DNA, 38 bp, Artificial Sequence
  Synthetic oligonucleotide
aacgagtgcaacaggtaataaatcgcccctaaccgtga

SEQ ID NO: 6958 - DNA, 37 bp, Artificial Sequence
  Synthetic oligonucleotide
gacaggacgagccaggtccatacgccagtcactctga

SEQ ID NO: 6959 - DNA, 35 bp, Artificial Sequence
  Synthetic oligonucleotide
gagtgatgcagtcacgtgattaacaggccaggagg

SEQ ID NO: 6960 - DNA, 35 bp, Artificial Sequence
  Synthetic oligonucleotide
gatggcctccccgacgctcacaagaatgcggttat

SEQ ID NO: 6961 - DNA, 35 bp, Artificial Sequence
  Synthetic oligonucleotide
gcatgcatactgtccggacggaagacatactgact

SEQ ID NO: 6962 - DNA, 38 bp, Artificial Sequence
  Synthetic oligonucleotide
tacgcgcaaagctggttgtacgctttggaaagtaatga

SEQ ID NO: 6963 - DNA, 36 bp, Artificial Sequence
  Synthetic oligonucleotide
tgccgcaacggagaagctaagcatagaacgtgggta

SEQ ID NO: 6964 - DNA, 37 bp, Artificial Sequence
  Synthetic oligonucleotide
tgcgagagcctccgatgagaaagtggtatattggtga

SEQ ID NO: 6965 - DNA, 37 bp, Artificial Sequence
  Synthetic oligonucleotide
acctaccgcagagtagttcaaacggctccacatagga

SEQ ID NO: 6966 - DNA, 36 bp, Artificial Sequence
  Synthetic oligonucleotide
aggtcaggcgcacggatcagttgataacaatgccca

SEQ ID NO: 6967 - DNA, 35 bp, Artificial Sequence
  Synthetic oligonucleotide
gaaccatccgccagcatgctcgtttcaaatagatt

SEQ ID NO: 6968 - DNA, 36 bp, Artificial Sequence
  Synthetic oligonucleotide
gacacggacgaaggttaagtaaggacgcgaaagtta

SEQ ID NO: 6969 - DNA, 36 bp, Artificial Sequence
  Synthetic oligonucleotide
gcaaccctaccccgaatttacgacttaccccgataa

SEQ ID NO: 6970 - DNA, 38 bp, Artificial Sequence
  Synthetic oligonucleotide
gcagacccagggggtaagggatcatggtagggatatga

SEQ ID NO: 6971 - DNA, 35 bp, Artificial Sequence
  Synthetic oligonucleotide
gcatccggaaggacgtgattgtggtcactgcaaca

SEQ ID NO: 6972 - DNA, 36 bp, Artificial Sequence
  Synthetic oligonucleotide
gccgtgcaagccaacaagagcctcacgtcctttgta

SEQ ID NO: 6973 - DNA, 36 bp, Artificial Sequence
  Synthetic oligonucleotide
gtgcgagagtgtgggtaataggagtactgtgggtta

SEQ ID NO: 6974 - DNA, 38 bp, Artificial Sequence
  Synthetic oligonucleotide
tcactgcggggttgatcgctgaagttgagagtctgtga

SEQ ID NO: 6975 - DNA, 36 bp, Artificial Sequence
  Synthetic oligonucleotide
tgcacccacgtagtgcaccactgaccccgatattca

SEQ ID NO: 6976 - DNA, 35 bp, Artificial Sequence
  Synthetic oligonucleotide
tgccccatgccagtcatgaccaccttgacactcac

SEQ ID NO: 6977 - DNA, 38 bp, Artificial Sequence
  Synthetic oligonucleotide
tgtgccgaacggggcaaaggtaaggtcagttaagatga

SEQ ID NO: 6978 - DNA, 37 bp, Artificial Sequence
  Synthetic oligonucleotide
aaccaccgtgccctctcgtatatatcgactatcggga

SEQ ID NO: 6979 - DNA, 38 bp, Artificial Sequence
  Synthetic oligonucleotide
acacaccggcgaaaggacggtactgaatacgtccatga

SEQ ID NO: 6980 - DNA, 36 bp, Artificial Sequence
  Synthetic oligonucleotide
ccatgccacgcctcaaaaggaaggagagtgaggtaa

SEQ ID NO: 6981 - DNA, 35 bp, Artificial Sequence
  Synthetic oligonucleotide
cggggagccatgacgctatgtagttatcatgcatg

SEQ ID NO: 6982 - DNA, 35 bp, Artificial Sequence
  Synthetic oligonucleotide
gacacccgcacactatacgtgaccacggactcatt

SEQ ID NO: 6983 - DNA, 35 bp, Artificial Sequence
  Synthetic oligonucleotide
gacgcaaccggacccactagtaacgagtctacgct

SEQ ID NO: 6984 - DNA, 36 bp, Artificial Sequence
  Synthetic oligonucleotide
gcatagtcctcaggaggtggagcaacagttaggcta

SEQ ID NO: 6985 - DNA, 35 bp, Artificial Sequence
  Synthetic oligonucleotide
tacgaccgtaggagttatagtttcgttcccttgct

SEQ ID NO: 6986 - DNA, 38 bp, Artificial Sequence
  Synthetic oligonucleotide
tcacacgccgtcaattcctgttccgatcctgctactga

SEQ ID NO: 6987 - DNA, 35 bp, Artificial Sequence
  Synthetic oligonucleotide
tgaccactcctttttttggtaacccggtgtctcca

SEQ ID NO: 6988 - DNA, 38 bp, Artificial Sequence
  Synthetic oligonucleotide
aacaccgcgatgtcgttaggtccgaaaccacttcctga

SEQ ID NO: 6989 - DNA, 35 bp, Artificial Sequence
  Synthetic oligonucleotide
accgcaagtgcgggacgtgggggggactcacagaa

SEQ ID NO: 6990 - DNA, 35 bp, Artificial Sequence
  Synthetic oligonucleotide
gacacgaggacatactaaacagtccagctcaaaat

SEQ ID NO: 6991 - DNA, 35 bp, Artificial Sequence
  Synthetic oligonucleotide
gacgggctcgcaccgcacgtatatttttacctgct

SEQ ID NO: 6992 - DNA, 35 bp, Artificial Sequence
  Synthetic oligonucleotide
gagctcatggggtaccggccactcctcatccccta

SEQ ID NO: 6993 - DNA, 35 bp, Artificial Sequence
  Synthetic oligonucleotide
gccgacggaagtggtataccagacggcgcatacca

SEQ ID NO: 6994 - DNA, 36 bp, Artificial Sequence
  Synthetic oligonucleotide
tacacgacgccctgatccttgaacgaggtctgtgga

SEQ ID NO: 6995 - DNA, 35 bp, Artificial Sequence
  Synthetic oligonucleotide
tgggccgggtggtggtgggtatcggaaggtgggtt

SEQ ID NO: 6996 - DNA, 36 bp, Artificial Sequence
  Synthetic oligonucleotide
aacccagcccacgttgtccttcattttcctaatcta

SEQ ID NO: 6997 - DNA, 35 bp, Artificial Sequence
  Synthetic oligonucleotide
acgcagggccgttacctttcaatcacctttcgttc

SEQ ID NO: 6998 - DNA, 35 bp, Artificial Sequence
  Synthetic oligonucleotide
atgcacccgaacgcgaaggttagcactatcaccga

SEQ ID NO: 6999 - DNA, 35 bp, Artificial Sequence
  Synthetic oligonucleotide
cggtgccggaacacaagcccagcctcaggtattcc

SEQ ID NO: 7000 - DNA, 35 bp, Artificial Sequence
  Synthetic oligonucleotide
gaccgaagctgccggctgaccttctctaacctatc

SEQ ID NO: 7001 - DNA, 38 bp, Artificial Sequence
  Synthetic oligonucleotide
gacgagtcgcaccaatgtagcgtaaggatacgccgtga

SEQ ID NO: 7002 - DNA, 34 bp, Artificial Sequence
  Synthetic oligonucleotide
gatgcgcaccagctgcaaccgtggtcagaacact

SEQ ID NO: 7003 - DNA, 36 bp, Artificial Sequence
  Synthetic oligonucleotide
gcacgacgtcctcaccgtccatcattagtaacgtaa

SEQ ID NO: 7004 - DNA, 35 bp, Artificial Sequence
  Synthetic oligonucleotide
gccacaggaggaaattccatggtgactcctgacac

SEQ ID NO: 7005 - DNA, 36 bp, Artificial Sequence
  Synthetic oligonucleotide
gcccaccgcaactcgactaaaaagccacataaataa

SEQ ID NO: 7006 - DNA, 38 bp, Artificial Sequence
  Synthetic oligonucleotide
gtggtccccgaacgttctcatcacgcttacagttatga

SEQ ID NO: 7007 - DNA, 35 bp, Artificial Sequence
  Synthetic oligonucleotide
tacgcgccacgcccacaccgcttagaaccaaacct

SEQ ID NO: 7008 - DNA, 37 bp, Artificial Sequence
  Synthetic oligonucleotide
atcacgcaaaggaggtgccgtaacgagacgacagtga

SEQ ID NO: 7009 - DNA, 35 bp, Artificial Sequence
  Synthetic oligonucleotide
gatgggccagcctcgtaatggtgttctcgaatgga

SEQ ID NO: 7010 - DNA, 37 bp, Artificial Sequence
  Synthetic oligonucleotide
tcacaggacgtagacggacagaaccgacgaggagcga

SEQ ID NO: 7011 - DNA, 38 bp, Artificial Sequence
  Synthetic oligonucleotide
acactgcaacccagggcgatgagagcctaccagagtga

SEQ ID NO: 7012 - DNA, 37 bp, Artificial Sequence
  Synthetic oligonucleotide
gacgcggaccacgtccacgtgtgtatactagcgatga

SEQ ID NO: 7013 - DNA, 38 bp, Artificial Sequence
  Synthetic oligonucleotide
gagcacatcgtcgtgtatggcccctagtttttcgctga

SEQ ID NO: 7014 - DNA, 37 bp, Artificial Sequence
  Synthetic oligonucleotide
gatgccctcgcaatcaagaaatgtcttgtacagtgga

SEQ ID NO: 7015 - DNA, 35 bp, Artificial Sequence
  Synthetic oligonucleotide
ttgacaccgccagtgttgcaagttttcgctgaacg

SEQ ID NO: 7016 - DNA, 35 bp, Artificial Sequence
  Synthetic oligonucleotide
acacgaggcctagtacgatcagtatagtcgccaaa

SEQ ID NO: 7017 - DNA, 35 bp, Artificial Sequence
  Synthetic oligonucleotide
acacgcacagtaggtcagtaggtcccaaccgatgg

SEQ ID NO: 7018 - DNA, 35 bp, Artificial Sequence
  Synthetic oligonucleotide
accgacaggtacgtccgttgagacaactttaaccg

SEQ ID NO: 7019 - DNA, 36 bp, Artificial Sequence
  Synthetic oligonucleotide
accgacgacggcaagaaagccccacgttacattgga

SEQ ID NO: 7020 - DNA, 37 bp, Artificial Sequence
  Synthetic oligonucleotide
attcacgccggtcggcctcccgtcgattgtcgaggaa

SEQ ID NO: 7021 - DNA, 36 bp, Artificial Sequence
  Synthetic oligonucleotide
gacgccgaatctagagcagtcgttttcgttctatga

SEQ ID NO: 7022 - DNA, 37 bp, Artificial Sequence
  Synthetic oligonucleotide
gccgaccagcaggcacgcttgtagtcttgatcaccga

SEQ ID NO: 7023 - DNA, 35 bp, Artificial Sequence
  Synthetic oligonucleotide
gcgataccggaagtacgtaagtggacacaaccatt

SEQ ID NO: 7024 - DNA, 36 bp, Artificial Sequence
  Synthetic oligonucleotide
tacgccgcggtagctcgtaaaaatccaccggttagc

SEQ ID NO: 7025 - DNA, 37 bp, Artificial Sequence
  Synthetic oligonucleotide
tccaacgccatcatacctcgtaaaaccgccagtgcga

SEQ ID NO: 7026 - DNA, 38 bp, Artificial Sequence
  Synthetic oligonucleotide
tgagcgatccgggcgatacgtcgtaccaagctacttga

SEQ ID NO: 7027 - DNA, 36 bp, Artificial Sequence
  Synthetic oligonucleotide
tgcgaaccaagcgaggggcgcacggagactgactga

SEQ ID NO: 7028 - DNA, 36 bp, Artificial Sequence
  Synthetic oligonucleotide
aacaccgaagcctagagacactagcaattaaggtca

SEQ ID NO: 7029 - DNA, 37 bp, Artificial Sequence
  Synthetic oligonucleotide
aacacgaagcactgtgcgacgatacagtggttgtgga

SEQ ID NO: 7030 - DNA, 36 bp, Artificial Sequence
  Synthetic oligonucleotide
acccacccagagtttccaccgtcggtcctgcctcca

SEQ ID NO: 7031 - DNA, 36 bp, Artificial Sequence
  Synthetic oligonucleotide
agccgatccaatgtaacctagcacgtcgtcccccca

SEQ ID NO: 7032 - DNA, 37 bp, Artificial Sequence
  Synthetic oligonucleotide
atcgccccggtccagggtcgagaattgaggtatgcga

SEQ ID NO: 7033 - DNA, 37 bp, Artificial Sequence
  Synthetic oligonucleotide
gaacaacgaaggtgggcggggtcggtagtattgcgga

SEQ ID NO: 7034 - DNA, 35 bp, Artificial Sequence
  Synthetic oligonucleotide
gacaagcaccctcaatcgtcgtctaatgctcctgt

SEQ ID NO: 7035 - DNA, 38 bp, Artificial Sequence
  Synthetic oligonucleotide
gacgactttccatacagtcgagcctcccgtcgatttga

SEQ ID NO: 7036 - DNA, 35 bp, Artificial Sequence
  Synthetic oligonucleotide
gcgaagcacaacagcgtattgggtccagttgcgtc

SEQ ID NO: 7037 - DNA, 37 bp, Artificial Sequence
  Synthetic oligonucleotide
gtctccgcacccagccatacgcctcttagtccctcga

SEQ ID NO: 7038 - DNA, 37 bp, Artificial Sequence
  Synthetic oligonucleotide
gtgggccacagccaggtacgtggagaattgaaaatga

SEQ ID NO: 7039 - DNA, 36 bp, Artificial Sequence
  Synthetic oligonucleotide
tacgcgcaccaatgaaagacgagcatgcggttggca

SEQ ID NO: 7040 - DNA, 35 bp, Artificial Sequence
  Synthetic oligonucleotide
tatgtgctgcaggctgaccgtgttccatttctcca

SEQ ID NO: 7041 - DNA, 36 bp, Artificial Sequence
  Synthetic oligonucleotide
tgacaatccgtgctgcagatgagctgtgctacgtta

SEQ ID NO: 7042 - DNA, 36 bp, Artificial Sequence
  Synthetic oligonucleotide
tgaccggatccgtcatcctggcatctctacttagca

SEQ ID NO: 7043 - DNA, 36 bp, Artificial Sequence
  Synthetic oligonucleotide
acaacgtgccggggggtcaataaagcggtcggaata

SEQ ID NO: 7044 - DNA, 36 bp, Artificial Sequence
  Synthetic oligonucleotide
atcgatcgcgatgcaggcatacatggctattgttca

SEQ ID NO: 7045 - DNA, 37 bp, Artificial Sequence
  Synthetic oligonucleotide
gcacaggacgagacgcgttaaacgacggcctaacaga

SEQ ID NO: 7046 - DNA, 35 bp, Artificial Sequence
  Synthetic oligonucleotide
gccaacgtacactagtgtagtcacccgtctatatc

SEQ ID NO: 7047 - DNA, 36 bp, Artificial Sequence
  Synthetic oligonucleotide
gccgaccagagagatcgaatctttcgttgtcgcgaa

SEQ ID NO: 7048 - DNA, 38 bp, Artificial Sequence
  Synthetic oligonucleotide
gcctacatccgacgtgactaaggccttgcaagttttga

SEQ ID NO: 7049 - DNA, 37 bp, Artificial Sequence
  Synthetic oligonucleotide
gcgcacatgccgcatgggatcgatgttccggacacga

SEQ ID NO: 7050 - DNA, 37 bp, Artificial Sequence
  Synthetic oligonucleotide
gtcaacaccccagggtgcatgctagtactttaccaga

SEQ ID NO: 7051 - DNA, 35 bp, Artificial Sequence
  Synthetic oligonucleotide
gtcgaccagtcgcgacggttaacggaactgtcgat

SEQ ID NO: 7052 - DNA, 35 bp, Artificial Sequence
  Synthetic oligonucleotide
gtgtatcctgaccccgtaaccaaatgacaggcaca

SEQ ID NO: 7053 - DNA, 35 bp, Artificial Sequence
  Synthetic oligonucleotide
tgccattccggggttggggcaccatatgcgtttag

SEQ ID NO: 7054 - DNA, 36 bp, Artificial Sequence
  Synthetic oligonucleotide
ttcgaaagcaggccaggttaagggacacacggcaaa

SEQ ID NO: 7055 - DNA, 35 bp, Artificial Sequence
  Synthetic oligonucleotide
acaacctgcgccggcgggagtagatcgaacgagtg

SEQ ID NO: 7056 - DNA, 37 bp, Artificial Sequence
  Synthetic oligonucleotide
acacagccgaccattgctataacgtggtggataacga

SEQ ID NO: 7057 - DNA, 37 bp, Artificial Sequence
  Synthetic oligonucleotide
accatgctgagtcacatatagtgtcacctatgagaga

SEQ ID NO: 7058 - DNA, 35 bp, Artificial Sequence
  Synthetic oligonucleotide
atgcgaggggatgagcattactacatcagaggggg

SEQ ID NO: 7059 - DNA, 35 bp, Artificial Sequence
  Synthetic oligonucleotide
gcacctcaccgacgttcaccaaagagccctttctt

SEQ ID NO: 7060 - DNA, 37 bp, Artificial Sequence
  Synthetic oligonucleotide
gcactggccccttagacatgtaacatcccgttgctga

SEQ ID NO: 7061 - DNA, 35 bp, Artificial Sequence
  Synthetic oligonucleotide
gcctgacgccagtagagtccagtcgtgtcgtgttc

SEQ ID NO: 7062 - DNA, 35 bp, Artificial Sequence
  Synthetic oligonucleotide
ggaccacggtccagtgtcacagcttgacgctaaat

SEQ ID NO: 7063 - DNA, 38 bp, Artificial Sequence
  Synthetic oligonucleotide
tcatccacacaggctgttctacgagggcaaggttatga

SEQ ID NO: 7064 - DNA, 34 bp, Artificial Sequence
  Synthetic oligonucleotide
tgacacccaccgacggaagtgatacgctcctttg

SEQ ID NO: 7065 - DNA, 35 bp, Artificial Sequence
  Synthetic oligonucleotide
tgagcaccacacataggaacctaccctgaaatccg

SEQ ID NO: 7066 - DNA, 36 bp, Artificial Sequence
  Synthetic oligonucleotide
aatgcaaccgatgcttcccgtgacgtctcatcacaa

SEQ ID NO: 7067 - DNA, 35 bp, Artificial Sequence
  Synthetic oligonucleotide
gacgcgactctggtaacaggaccacggaaccatct

SEQ ID NO: 7068 - DNA, 37 bp, Artificial Sequence
  Synthetic oligonucleotide
gatccgcccacgaccaacttttataatgaggtccgga

SEQ ID NO: 7069 - DNA, 36 bp, Artificial Sequence
  Synthetic oligonucleotide
gatggacgagcacaagactgtggaatgacgaacggg

SEQ ID NO: 7070 - DNA, 38 bp, Artificial Sequence
  Synthetic oligonucleotide
gccatgccgcatgtacagtataaggggcatttggctga

SEQ ID NO: 7071 - DNA, 36 bp, Artificial Sequence
  Synthetic oligonucleotide
tacagaccccgacgcatcccaatgcataaacgttca

SEQ ID NO: 7072 - DNA, 37 bp, Artificial Sequence
  Synthetic oligonucleotide
tcagtcaccgcatccagactccattaccagcaaacga

SEQ ID NO: 7073 - DNA, 37 bp, Artificial Sequence
  Synthetic oligonucleotide
acaccgggatggtcaatcgcctgaccgtacggtagga

SEQ ID NO: 7074 - DNA, 36 bp, Artificial Sequence
  Synthetic oligonucleotide
atgcacctgcagacagatctcttcgctttccacaca

SEQ ID NO: 7075 - DNA, 37 bp, Artificial Sequence
  Synthetic oligonucleotide
gacaatgcgcatcctgaggcgtatccgaggagggaga

SEQ ID NO: 7076 - DNA, 36 bp, Artificial Sequence
  Synthetic oligonucleotide
gagcatagccaccagacatctcacgcgtacagaaaa

SEQ ID NO: 7077 - DNA, 35 bp, Artificial Sequence
  Synthetic oligonucleotide
gcaccgctcagaccccccagtggactaccagggta

SEQ ID NO: 7078 - DNA, 35 bp, Artificial Sequence
  Synthetic oligonucleotide
gccaatcgaccggagatcgtgccgcggcctaggtc

SEQ ID NO: 7079 - DNA, 37 bp, Artificial Sequence
  Synthetic oligonucleotide
gccacatcaccgtactcattacaaccgcatgctagga

SEQ ID NO: 7080 - DNA, 37 bp, Artificial Sequence
  Synthetic oligonucleotide
gtgctgcacacactgttatgttgcaatcagtaaagga

SEQ ID NO: 7081 - DNA, 35 bp, Artificial Sequence
  Synthetic oligonucleotide
tgacccatgcccgtcccacgcggaagaggtacaca

SEQ ID NO: 7082 - DNA, 35 bp, Artificial Sequence
  Synthetic oligonucleotide
tgcgacgggcgggataggtgaaacagtctatcgtc

SEQ ID NO: 7083 - DNA, 36 bp, Artificial Sequence
  Synthetic oligonucleotide
acaagccacggtcgctctctactcgccattggtcca

SEQ ID NO: 7084 - DNA, 35 bp, Artificial Sequence
  Synthetic oligonucleotide
acacacatcgcatgaaacaacgcagaccagctggc

SEQ ID NO: 7085 - DNA, 36 bp, Artificial Sequence
  Synthetic oligonucleotide
acgaaggctcaggccaacgtacacaaggaggtacga

SEQ ID NO: 7086 - DNA, 34 bp, Artificial Sequence
  Synthetic oligonucleotide
aggtcgcatgaacggtgctcctgaatcgacccga

SEQ ID NO: 7087 - DNA, 38 bp, Artificial Sequence
  Synthetic oligonucleotide
atgacgcggggaatcggtacggaggattgcaccattga

SEQ ID NO: 7088 - DNA, 37 bp, Artificial Sequence
  Synthetic oligonucleotide
gagaccgctccccagtccgctaagacatatccccaga

SEQ ID NO: 7089 - DNA, 37 bp, Artificial Sequence
  Synthetic oligonucleotide
gagccggagcgagccgtgcatgtttatcagcaatcga

SEQ ID NO: 7090 - DNA, 36 bp, Artificial Sequence
  Synthetic oligonucleotide
gagggcaccagttcggatgtcgtcaatcatagttaa

SEQ ID NO: 7091 - DNA, 35 bp, Artificial Sequence
  Synthetic oligonucleotide
gcaaggaaaccactgaccccgttataaatccaaga

SEQ ID NO: 7092 - DNA, 37 bp, Artificial Sequence
  Synthetic oligonucleotide
gccattcgtaacaggttgacaaggactgatggcgaga

SEQ ID NO: 7093 - DNA, 35 bp, Artificial Sequence
  Synthetic oligonucleotide
gcgccatcaacagaggactccatcactcatcggct

SEQ ID NO: 7094 - DNA, 38 bp, Artificial Sequence
  Synthetic oligonucleotide
tacgccattgcaaaggatcactgaccggtcaaacgtga

SEQ ID NO: 7095 - DNA, 37 bp, Artificial Sequence
  Synthetic oligonucleotide
tcccccaaccccgcatcatgcagtttatgttccccga

SEQ ID NO: 7096 - DNA, 36 bp, Artificial Sequence
  Synthetic oligonucleotide
tccccccagggatcatacaccccagtttatcagtga

SEQ ID NO: 7097 - DNA, 37 bp, Artificial Sequence
  Synthetic oligonucleotide
ttacgacgcacaacgtaaaagaaattaacagtcagga

SEQ ID NO: 7098 - DNA, 38 bp, Artificial Sequence
  Synthetic oligonucleotide
accgaggggcatccaagcgcaaaggtaacaggggctga

SEQ ID NO: 7099 - DNA, 38 bp, Artificial Sequence
  Synthetic oligonucleotide
acgctggcaagctgtttaaagtatctgctactcgctga

SEQ ID NO: 7100 - DNA, 36 bp, Artificial Sequence
  Synthetic oligonucleotide
atcgcacgcagacatctacccacaccgccgacgaaa

SEQ ID NO: 7101 - DNA, 37 bp, Artificial Sequence
  Synthetic oligonucleotide
gaaccggaggtgaacgtggagtcacgcttgatatgga

SEQ ID NO: 7102 - DNA, 35 bp, Artificial Sequence
  Synthetic oligonucleotide
gccagtgtacgcagtcaagttgcgctgtacgaggc

SEQ ID NO: 7103 - DNA, 36 bp, Artificial Sequence
  Synthetic oligonucleotide
ggtgatgcaccgctggagtcatctttccataaagca

SEQ ID NO: 7104 - DNA, 36 bp, Artificial Sequence
  Synthetic oligonucleotide
tcatccaccacgactgcttaaacagctgcaggtaca

SEQ ID NO: 7105 - DNA, 37 bp, Artificial Sequence
  Synthetic oligonucleotide
tcatgcaacccgcaccctagccgactaccatagtcga

SEQ ID NO: 7106 - DNA, 36 bp, Artificial Sequence
  Synthetic oligonucleotide
tccaccgccacatgatcatcagaggaacggtcgcca

SEQ ID NO: 7107 - DNA, 38 bp, Artificial Sequence
  Synthetic oligonucleotide
acaacaagccgagacaatcaagagcgtgtgagggttga

SEQ ID NO: 7108 - DNA, 38 bp, Artificial Sequence
  Synthetic oligonucleotide
acatccggcgtacagtaggcccgatattcaaggactga

SEQ ID NO: 7109 - DNA, 35 bp, Artificial Sequence
  Synthetic oligonucleotide
agcgcctgcccacaccaaatgcgtactgatctctg

SEQ ID NO: 7110 - DNA, 37 bp, Artificial Sequence
  Synthetic oligonucleotide
agtgcaatcggccgggggatgggagtcaatttcgcga

SEQ ID NO: 7111 - DNA, 35 bp, Artificial Sequence
  Synthetic oligonucleotide
gaacacgaaccgttaagacagggtctcaggtccgc

SEQ ID NO: 7112 - DNA, 38 bp, Artificial Sequence
  Synthetic oligonucleotide
gacaccccagctggcatagaacatgttagattgaatga

SEQ ID NO: 7113 - DNA, 38 bp, Artificial Sequence
  Synthetic oligonucleotide
gacaggcccccacttctgaccccgcgagactttcatga

SEQ ID NO: 7114 - DNA, 36 bp, Artificial Sequence
  Synthetic oligonucleotide
gatcacgtaccacgagcgatcgactcagttttcgga

SEQ ID NO: 7115 - DNA, 35 bp, Artificial Sequence
  Synthetic oligonucleotide
gcccgcaccgcacaatcgcatccgaatcacgttcg

SEQ ID NO: 7116 - DNA, 35 bp, Artificial Sequence
  Synthetic oligonucleotide
gcgatagcaagtacgtggggagaagtatcaggcga

SEQ ID NO: 7117 - DNA, 37 bp, Artificial Sequence
  Synthetic oligonucleotide
ggtggagcctcgccaccaaggaaccgcaataaaagga

SEQ ID NO: 7118 - DNA, 35 bp, Artificial Sequence
  Synthetic oligonucleotide
tcacgcgccgagcaggagctaggttcccggctgat

SEQ ID NO: 7119 - DNA, 35 bp, Artificial Sequence
  Synthetic oligonucleotide
tcagccccaccgttaaaccttgctactgccgagtg

SEQ ID NO: 7120 - DNA, 38 bp, Artificial Sequence
  Synthetic oligonucleotide
tgcgaaagcgggacgagggcatggatacactttcgtga

SEQ ID NO: 7121 - DNA, 35 bp, Artificial Sequence
  Synthetic oligonucleotide
aacccaaccccgactccttagaccccgtccagtac

SEQ ID NO: 7122 - DNA, 38 bp, Artificial Sequence
  Synthetic oligonucleotide
accacggactagcaaccaagcgcttgactccaatctga

SEQ ID NO: 7123 - DNA, 38 bp, Artificial Sequence
  Synthetic oligonucleotide
cacgggtgcccaataggatgacggaattgccttggtga

SEQ ID NO: 7124 - DNA, 36 bp, Artificial Sequence
  Synthetic oligonucleotide
gacaagccaaagctggtgcgttaacccaggcatcaa

SEQ ID NO: 7125 - DNA, 35 bp, Artificial Sequence
  Synthetic oligonucleotide
gaccaaccaggcccgtcgtagaggccagacaggac

SEQ ID NO: 7126 - DNA, 38 bp, Artificial Sequence
  Synthetic oligonucleotide
gacgcagtcagccacgcaccaacacatctataccttga

SEQ ID NO: 7127 - DNA, 30 bp, Artificial Sequence
  Synthetic oligonucleotide
gccacccaggcttccaaaggcaatttcgag

SEQ ID NO: 7128 - DNA, 35 bp, Artificial Sequence
  Synthetic oligonucleotide
gtgtcatgcggacttccaacaaccttaaatattag

SEQ ID NO: 7129 - DNA, 36 bp, Artificial Sequence
  Synthetic oligonucleotide
ttgacgtggagcaatcgtacgcaatctgatctcgta

SEQ ID NO: 7130 - DNA, 35 bp, Artificial Sequence
  Synthetic oligonucleotide
aactgcgtggagtgccgcccatatcttttcacacc

SEQ ID NO: 7131 - DNA, 37 bp, Artificial Sequence
  Synthetic oligonucleotide
acaaccagcaggttgtggatgaagtgctttaatgcga

SEQ ID NO: 7132 - DNA, 32 bp, Artificial Sequence
  Synthetic oligonucleotide
acacccggtctggggcacgacaaccaggagga

SEQ ID NO: 7133 - DNA, 36 bp, Artificial Sequence
  Synthetic oligonucleotide
gacgacgcagtgagccataagctgaccttggatgaa

SEQ ID NO: 7134 - DNA, 35 bp, Artificial Sequence
  Synthetic oligonucleotide
gcacacttcggaaccagcttgaactccttaaatcg

SEQ ID NO: 7135 - DNA, 35 bp, Artificial Sequence
  Synthetic oligonucleotide
gtgcataggtcgaaggtcaagtaggggtggcggcc

SEQ ID NO: 7136 - DNA, 35 bp, Artificial Sequence
  Synthetic oligonucleotide
tactacacccacactgatctccactgaccgtaagg

SEQ ID NO: 7137 - DNA, 37 bp, Artificial Sequence
  Synthetic oligonucleotide
ttgcaaaggccgaagaggaagcagaaggcagtcggga

SEQ ID NO: 7138 - DNA, 37 bp, Artificial Sequence
  Synthetic oligonucleotide
aacgacgcgaaatatggcgttaaacgataagcgggga

SEQ ID NO: 7139 - DNA, 37 bp, Artificial Sequence
  Synthetic oligonucleotide
acatagccgacgcagaagcacgtgcacccattaacga

SEQ ID NO: 7140 - DNA, 37 bp, Artificial Sequence
  Synthetic oligonucleotide
accgccgcccacgtagtcgtatctaccgacagactga

SEQ ID NO: 7141 - DNA, 35 bp, Artificial Sequence
  Synthetic oligonucleotide
agtcgagcccccaactaccatctcgcggtgggtta

SEQ ID NO: 7142 - DNA, 37 bp, Artificial Sequence
  Synthetic oligonucleotide
atcccaccccgccagatgactaagggaagcttgaaga

SEQ ID NO: 7143 - DNA, 36 bp, Artificial Sequence
  Synthetic oligonucleotide
atcgccgcacattaagcatgggtcgttatacaggta

SEQ ID NO: 7144 - DNA, 35 bp, Artificial Sequence
  Synthetic oligonucleotide
atgaccggacgtgccaccaacgaatcacattcagc

SEQ ID NO: 7145 - DNA, 36 bp, Artificial Sequence
  Synthetic oligonucleotide
atgccgcaggtccggcgcgatcacctcacagctgca

SEQ ID NO: 7146 - DNA, 35 bp, Artificial Sequence
  Synthetic oligonucleotide
gagaacaacgcacatgggtgggttctgtaactgat

SEQ ID NO: 7147 - DNA, 36 bp, Artificial Sequence
  Synthetic oligonucleotide
gagccagtcggagtcacggtgtctgctacgttatga

SEQ ID NO: 7148 - DNA, 38 bp, Artificial Sequence
  Synthetic oligonucleotide
gtgagccgtccaagtgaataagggtagtgggcctctga

SEQ ID NO: 7149 - DNA, 36 bp, Artificial Sequence
  Synthetic oligonucleotide
gtggagcgcacgtacccagtcacttttcctttccta

SEQ ID NO: 7150 - DNA, 37 bp, Artificial Sequence
  Synthetic oligonucleotide
tacgccccggccatgtcattcatacgctaccagtaga

SEQ ID NO: 7151 - DNA, 38 bp, Artificial Sequence
  Synthetic oligonucleotide
tgacccgcaggcatatatctagccatctatgttcttga

SEQ ID NO: 7152 - DNA, 37 bp, Artificial Sequence
  Synthetic oligonucleotide
tgacgagctgcagagtgtgagagaatagctacctcga

SEQ ID NO: 7153 - DNA, 37 bp, Artificial Sequence
  Synthetic oligonucleotide
accgatgggcgcaagttaatttggacatagaagtatg

SEQ ID NO: 7154 - DNA, 35 bp, Artificial Sequence
  Synthetic oligonucleotide
agaccccgtaaccacaacacctaaacagcaccccg

SEQ ID NO: 7155 - DNA, 37 bp, Artificial Sequence
  Synthetic oligonucleotide
atcgcccggagcagtacatatttttgactgtgcttga

SEQ ID NO: 7156 - DNA, 36 bp, Artificial Sequence
  Synthetic oligonucleotide
atgcatcccgtggtgtaatacggactgcacagtgta

SEQ ID NO: 7157 - DNA, 37 bp, Artificial Sequence
  Synthetic oligonucleotide
cgcatcaaccggacgatgacatgtagtgtgccagtga

SEQ ID NO: 7158 - DNA, 36 bp, Artificial Sequence
  Synthetic oligonucleotide
gacgaaccaatggcgaacaaaggctgagatacggta

SEQ ID NO: 7159 - DNA, 38 bp, Artificial Sequence
  Synthetic oligonucleotide
gagaacagccgcagtcaagaacagggcgtcgtagctga

SEQ ID NO: 7160 - DNA, 35 bp, Artificial Sequence
  Synthetic oligonucleotide
gtcacccccagagaacaacccgtcaatccgtcatc

SEQ ID NO: 7161 - DNA, 38 bp, Artificial Sequence
  Synthetic oligonucleotide
tatgctgagcagggatgttcgatcgggtcaaggcgtga

SEQ ID NO: 7162 - DNA, 36 bp, Artificial Sequence
  Synthetic oligonucleotide
tgatacacacagcatgcgggttgaccttagtacaga

SEQ ID NO: 7163 - DNA, 38 bp, Artificial Sequence
  Synthetic oligonucleotide
tgtgaagccatcacagtgggctgtgcctgaacgtatga

SEQ ID NO: 7164 - DNA, 35 bp, Artificial Sequence
  Synthetic oligonucleotide
tgtgacgcaagacggtatgctcgtccaacattgcg

SEQ ID NO: 7165 - DNA, 38 bp, Artificial Sequence
  Synthetic oligonucleotide
acgcacaccttatctccgctttactgaccccgccatga

SEQ ID NO: 7166 - DNA, 35 bp, Artificial Sequence
  Synthetic oligonucleotide
atcgcaccccgccacccgtttacagttcaaataga

SEQ ID NO: 7167 - DNA, 36 bp, Artificial Sequence
  Synthetic oligonucleotide
ccagacaacagaaaggggtgaatggggacggaaaga

SEQ ID NO: 7168 - DNA, 38 bp, Artificial Sequence
  Synthetic oligonucleotide
gaccatgaacagccacccggtactgagtgacgctctga

SEQ ID NO: 7169 - DNA, 36 bp, Artificial Sequence
  Synthetic oligonucleotide
gactgccacgcttgtgatacccggcctcaacgtcca

SEQ ID NO: 7170 - DNA, 35 bp, Artificial Sequence
  Synthetic oligonucleotide
gtgcaatgcaacagtgctagccttaaccttctaaa

SEQ ID NO: 7171 - DNA, 36 bp, Artificial Sequence
  Synthetic oligonucleotide
tccgacgccgagggaaaccaggaactgatgggtaca

SEQ ID NO: 7172 - DNA, 36 bp, Artificial Sequence
  Synthetic oligonucleotide
acacacagcatttcgccgccgtgaccggactatgta

SEQ ID NO: 7173 - DNA, 35 bp, Artificial Sequence
  Synthetic oligonucleotide
atcaacccgcggtcgaatgtagtcgtcatgcattc

SEQ ID NO: 7174 - DNA, 36 bp, Artificial Sequence
  Synthetic oligonucleotide
atgcaccaccgcgtgaccgtaaatcggccggtacga

SEQ ID NO: 7175 - DNA, 35 bp, Artificial Sequence
  Synthetic oligonucleotide
gaatcacgccgaatgtcatgccctctgtgccccat

SEQ ID NO: 7176 - DNA, 35 bp, Artificial Sequence
  Synthetic oligonucleotide
gacgaacgaggctcgagcagtttgattacctccta

SEQ ID NO: 7177 - DNA, 37 bp, Artificial Sequence
  Synthetic oligonucleotide
gctgaccccgctccccattaacatattttgtccccga

SEQ ID NO: 7178 - DNA, 37 bp, Artificial Sequence
  Synthetic oligonucleotide
tagacgcgaacgccaatcttcgttctagtacgtacga

SEQ ID NO: 7179 - DNA, 36 bp, Artificial Sequence
  Synthetic oligonucleotide
tcaaccggtcgaaggacgttcggagatatgattaca

SEQ ID NO: 7180 - DNA, 36 bp, Artificial Sequence
  Synthetic oligonucleotide
acaccgcacatcttgccccggtgatcccgcacgtta

SEQ ID NO: 7181 - DNA, 37 bp, Artificial Sequence
  Synthetic oligonucleotide
accacgacaagcatgatgtaatcgatgttagacgaga

SEQ ID NO: 7182 - DNA, 35 bp, Artificial Sequence
  Synthetic oligonucleotide
acccacgccaactcgtcgtaaagtttaggactctc

SEQ ID NO: 7183 - DNA, 37 bp, Artificial Sequence
  Synthetic oligonucleotide
acccgccgtcgagggtgatgcccaacaacgttacaga

SEQ ID NO: 7184 - DNA, 37 bp, Artificial Sequence
  Synthetic oligonucleotide
atcgaaaccagaaggcacttgaaccagccacacgtga

SEQ ID NO: 7185 - DNA, 36 bp, Artificial Sequence
  Synthetic oligonucleotide
atcgcccaacgcaagggacgattaaagttttttgga

SEQ ID NO: 7186 - DNA, 37 bp, Artificial Sequence
  Synthetic oligonucleotide
atgacgcggtggtggcatatcgccgacgagtgacgga

SEQ ID NO: 7187 - DNA, 35 bp, Artificial Sequence
  Synthetic oligonucleotide
cacccgcgcgtttaagtatacgacacgattatgcg

SEQ ID NO: 7188 - DNA, 36 bp, Artificial Sequence
  Synthetic oligonucleotide
gagcacacagcccagctagaaacgccctaagaagga

SEQ ID NO: 7189 - DNA, 38 bp, Artificial Sequence
  Synthetic oligonucleotide
gagtccgcccgtctggtagccaacatggtgtttcatga

SEQ ID NO: 7190 - DNA, 36 bp, Artificial Sequence
  Synthetic oligonucleotide
gcaccaacagcaaaccataaggaggcgtattccaca

SEQ ID NO: 7191 - DNA, 35 bp, Artificial Sequence
  Synthetic oligonucleotide
gcaccaccccacttaggtacccgctcatccaccat

SEQ ID NO: 7192 - DNA, 35 bp, Artificial Sequence
  Synthetic oligonucleotide
tacgtgccacacagcgtaagtgcatgctacaatca

SEQ ID NO: 7193 - DNA, 36 bp, Artificial Sequence
  Synthetic oligonucleotide
tgcgggggaggtcgagagataagtggtaaggtttga

SEQ ID NO: 7194 - DNA, 35 bp, Artificial Sequence
  Synthetic oligonucleotide
acacccagtgcgaagtaatcgaccactgatgcccc

SEQ ID NO: 7195 - DNA, 35 bp, Artificial Sequence
  Synthetic oligonucleotide
acaccccgcgcacacagcctctcctagtcatgatc

SEQ ID NO: 7196 - DNA, 36 bp, Artificial Sequence
  Synthetic oligonucleotide
accgacgcaagggcacagggtttagctttaaaagta

SEQ ID NO: 7197 - DNA, 34 bp, Artificial Sequence
  Synthetic oligonucleotide
gacgaacagccgtcgagactctatgcacttctcc

SEQ ID NO: 7198 - DNA, 35 bp, Artificial Sequence
  Synthetic oligonucleotide
gatccacgcgtacctaagcagtatctcgcgttact

SEQ ID NO: 7199 - DNA, 36 bp, Artificial Sequence
  Synthetic oligonucleotide
gcacgcacggtttggatgggcgctgaatatcaacta

SEQ ID NO: 7200 - DNA, 37 bp, Artificial Sequence
  Synthetic oligonucleotide
gctaacccactcatccaccatcagaggacttttccga

SEQ ID NO: 7201 - DNA, 34 bp, Artificial Sequence
  Synthetic oligonucleotide
gtcacggtcgctcaggacatctctaggaaagcat

SEQ ID NO: 7202 - DNA, 35 bp, Artificial Sequence
  Synthetic oligonucleotide
gtgcggtgacgtgcacgtacgaaaggtcccaattc

SEQ ID NO: 7203 - DNA, 35 bp, Artificial Sequence
  Synthetic oligonucleotide
tacatcagccatcgtgctgtagtgcgtggccaagc

SEQ ID NO: 7204 - DNA, 37 bp, Artificial Sequence
  Synthetic oligonucleotide
tcaaccgctacggtaacgtaacctcaagccacctaga

SEQ ID NO: 7205 - DNA, 36 bp, Artificial Sequence
  Synthetic oligonucleotide
tcactgcagggtgagcgctggtatcggtgctgcgaa

SEQ ID NO: 7206 - DNA, 35 bp, Artificial Sequence
  Synthetic oligonucleotide
tgaccggggacggttatgtcgactgtaaatacgag

SEQ ID NO: 7207 - DNA, 37 bp, Artificial Sequence
  Synthetic oligonucleotide
tgccacaagccgacattacgagggcaaagtttcctga

SEQ ID NO: 7208 - DNA, 36 bp, Artificial Sequence
  Synthetic oligonucleotide
ttgcgccgaccctagcagtatatcagtccgcctata

SEQ ID NO: 7209 - DNA, 36 bp, Artificial Sequence
  Synthetic oligonucleotide
ttggccgtgcacagatcaaatctccatcagacccga

SEQ ID NO: 7210 - DNA, 35 bp, Artificial Sequence
  Synthetic oligonucleotide
acaccgcccgagcacactactaaagcaccacctga

SEQ ID NO: 7211 - DNA, 36 bp, Artificial Sequence
  Synthetic oligonucleotide
acatacggccaaatgtcgtgcccatatacccaccta

SEQ ID NO: 7212 - DNA, 35 bp, Artificial Sequence
  Synthetic oligonucleotide
gacaacaccccgagtgaacggaacaggtttttcgc

SEQ ID NO: 7213 - DNA, 36 bp, Artificial Sequence
  Synthetic oligonucleotide
gacgacaccaacagctctatgagagatctaaggcaa

SEQ ID NO: 7214 - DNA, 38 bp, Artificial Sequence
  Synthetic oligonucleotide
gacgcaacgggccaggattgtgctaagtgaccacctga

SEQ ID NO: 7215 - DNA, 37 bp, Artificial Sequence
  Synthetic oligonucleotide
gacgcagtgcggccgtatgagaggtaggtatgttaga

SEQ ID NO: 7216 - DNA, 35 bp, Artificial Sequence
  Synthetic oligonucleotide
gccacctggaggggtaccacgagaaaaataaccgt

SEQ ID NO: 7217 - DNA, 35 bp, Artificial Sequence
  Synthetic oligonucleotide
tacgcctcacctcaacgtgcgagatcaatcaatag

SEQ ID NO: 7218 - DNA, 38 bp, Artificial Sequence
  Synthetic oligonucleotide
tctgaccgcggtacgtgcttgaattacgggcatcatga

SEQ ID NO: 7219 - DNA, 35 bp, Artificial Sequence
  Synthetic oligonucleotide
ttgccgaactgaaccctacttaccgactatcacta

SEQ ID NO: 7220 - DNA, 36 bp, Artificial Sequence
  Synthetic oligonucleotide
tttgccgccgccaaccaccgtgaagaaccgttagta

SEQ ID NO: 7221 - DNA, 36 bp, Artificial Sequence
  Synthetic oligonucleotide
acacacgccacattgcaccgaatactttccaatcca

SEQ ID NO: 7222 - DNA, 37 bp, Artificial Sequence
  Synthetic oligonucleotide
accacgtcaagaggatattacctgcgtttactgtcga

SEQ ID NO: 7223 - DNA, 35 bp, Artificial Sequence
  Synthetic oligonucleotide
atcatcactcgtcgcggcaccgatgacccacgcat

SEQ ID NO: 7224 - DNA, 35 bp, Artificial Sequence
  Synthetic oligonucleotide
atgcaccacccattgccaattcgaggcggatgcct

SEQ ID NO: 7225 - DNA, 36 bp, Artificial Sequence
  Synthetic oligonucleotide
attcaccgcaatcaactgagacactacgatcgcaca

SEQ ID NO: 7226 - DNA, 35 bp, Artificial Sequence
  Synthetic oligonucleotide
gacacgcaaagttgtcgatatgaggcttagcacac

SEQ ID NO: 7227 - DNA, 37 bp, Artificial Sequence
  Synthetic oligonucleotide
gacactgcaggtagggaaagcaccacacgatacttga

SEQ ID NO: 7228 - DNA, 36 bp, Artificial Sequence
  Synthetic oligonucleotide
gccaaggcgcacgtaataagatactacggagattca

SEQ ID NO: 7229 - DNA, 38 bp, Artificial Sequence
  Synthetic oligonucleotide
gccacgcgaatccgaccccgtattgtactccatcctga

SEQ ID NO: 7230 - DNA, 37 bp, Artificial Sequence
  Synthetic oligonucleotide
gccccaaccccgtatttagaaggtatccttagacgga

SEQ ID NO: 7231 - DNA, 35 bp, Artificial Sequence
  Synthetic oligonucleotide
tacggaccccgaaacctgccggaccccgtccactg

SEQ ID NO: 7232 - DNA, 36 bp, Artificial Sequence
  Synthetic oligonucleotide
tcaccggaggaacacgcgaacgacgacccagggaaa

SEQ ID NO: 7233 - DNA, 35 bp, Artificial Sequence
  Synthetic oligonucleotide
tgccacaacgcacacctcacaggacgccctagaac

SEQ ID NO: 7234 - DNA, 35 bp, Artificial Sequence
  Synthetic oligonucleotide
acgcaaacaacaagtctcataaatgaccgactccc

SEQ ID NO: 7235 - DNA, 35 bp, Artificial Sequence
  Synthetic oligonucleotide
gacatgccgtgcaaacccgtcgtctaattcgctct

SEQ ID NO: 7236 - DNA, 36 bp, Artificial Sequence
  Synthetic oligonucleotide
gaccggtccgccgtcgtataagggcatattgggata

SEQ ID NO: 7237 - DNA, 38 bp, Artificial Sequence
  Synthetic oligonucleotide
gcaccggtgaggaatgggtattgaggtaggggacatga

SEQ ID NO: 7238 - DNA, 35 bp, Artificial Sequence
  Synthetic oligonucleotide
gcactacgacacttaggcatgttcaccacattgat

SEQ ID NO: 7239 - DNA, 35 bp, Artificial Sequence
  Synthetic oligonucleotide
gccaaccccagacatacctttcgagtgtgagagaa

SEQ ID NO: 7240 - DNA, 37 bp, Artificial Sequence
  Synthetic oligonucleotide
gccaagcgcatacaactaaggaccacgcctgtgtcga

SEQ ID NO: 7241 - DNA, 37 bp, Artificial Sequence
  Synthetic oligonucleotide
gcgaccccagtcgccgtacttacgtatcaagcctgga

SEQ ID NO: 7242 - DNA, 38 bp, Artificial Sequence
  Synthetic oligonucleotide
gctgacggtgagtacgaacggaatgtctgaaggcatga

SEQ ID NO: 7243 - DNA, 38 bp, Artificial Sequence
  Synthetic oligonucleotide
gtccgaatccaactgtgacacgtctatgaaggcattga

SEQ ID NO: 7244 - DNA, 35 bp, Artificial Sequence
  Synthetic oligonucleotide
gtgcggaggcacaggttgttggtcgtgtacgttgt

SEQ ID NO: 7245 - DNA, 38 bp, Artificial Sequence
  Synthetic oligonucleotide
tcagtaccggagcaggtactgaacgacaagtacgctga

SEQ ID NO: 7246 - DNA, 36 bp, Artificial Sequence
  Synthetic oligonucleotide
tcagtcgccaccctttccattcgtcatcgttggcta

SEQ ID NO: 7247 - DNA, 38 bp, Artificial Sequence
  Synthetic oligonucleotide
tgaccggccctcctcctagtggatgtatggacatttga

SEQ ID NO: 7248 - DNA, 38 bp, Artificial Sequence
  Synthetic oligonucleotide
aacactaaccgcaccagtccgacgctctttccgtttga

SEQ ID NO: 7249 - DNA, 35 bp, Artificial Sequence
  Synthetic oligonucleotide
aaccacgactggaggacgcgtggcaggctactttc

SEQ ID NO: 7250 - DNA, 36 bp, Artificial Sequence
  Synthetic oligonucleotide
accatccccgcagcgcaaccctaaccgagcgcacca

SEQ ID NO: 7251 - DNA, 38 bp, Artificial Sequence
  Synthetic oligonucleotide
acctgacactgaccccgtaatccaggcgttatacgtga

SEQ ID NO: 7252 - DNA, 36 bp, Artificial Sequence
  Synthetic oligonucleotide
ccagaggcggagcacgctcgacagctcgcgcacgca

SEQ ID NO: 7253 - DNA, 37 bp, Artificial Sequence
  Synthetic oligonucleotide
gaaccacaatacggtagaataaagacgaaagtcacga

SEQ ID NO: 7254 - DNA, 36 bp, Artificial Sequence
  Synthetic oligonucleotide
gagcacacgccacaggtagtagtgagtatgttggga

SEQ ID NO: 7255 - DNA, 38 bp, Artificial Sequence
  Synthetic oligonucleotide
gcacacgcttgcagataagctcatcttaactcatatga

SEQ ID NO: 7256 - DNA, 38 bp, Artificial Sequence
  Synthetic oligonucleotide
gcacagtgctatcgttccgagcacagccattgccctga

SEQ ID NO: 7257 - DNA, 35 bp, Artificial Sequence
  Synthetic oligonucleotide
gcatgcgctagcaggcacgatgttgacttgcccaa

SEQ ID NO: 7258 - DNA, 38 bp, Artificial Sequence
  Synthetic oligonucleotide
gccaccggcacagtatgtttaatgctcgaccatcatga

SEQ ID NO: 7259 - DNA, 37 bp, Artificial Sequence
  Synthetic oligonucleotide
gtagcactcccaagtgcgatccactgtcttggccgga

SEQ ID NO: 7260 - DNA, 38 bp, Artificial Sequence
  Synthetic oligonucleotide
gtgacacatagctctgcggtgatcagacgtgtgggtga

SEQ ID NO: 7261 - DNA, 35 bp, Artificial Sequence
  Synthetic oligonucleotide
tacatccccatatcgcaaatgacctggactcgacg

SEQ ID NO: 7262 - DNA, 36 bp, Artificial Sequence
  Synthetic oligonucleotide
tgaccgccaacacacgtatgtcgacccagtgcccca

SEQ ID NO: 7263 - DNA, 38 bp, Artificial Sequence
  Synthetic oligonucleotide
aacacccaggcgtccagactagtacggccgacccgtga

SEQ ID NO: 7264 - DNA, 36 bp, Artificial Sequence
  Synthetic oligonucleotide
aacgggccggccgttgcgtacgcagagttgtgcaaa

SEQ ID NO: 7265 - DNA, 37 bp, Artificial Sequence
  Synthetic oligonucleotide
gacaggccagtggtgcccctaatcttcaggtcggtga

SEQ ID NO: 7266 - DNA, 33 bp, Artificial Sequence
  Synthetic oligonucleotide
gacgcactacagacccctaatggcgcggggagc

SEQ ID NO: 7267 - DNA, 36 bp, Artificial Sequence
  Synthetic oligonucleotide
gatacgcgcaaaacatgaaccctgccacacattcga

SEQ ID NO: 7268 - DNA, 38 bp, Artificial Sequence
  Synthetic oligonucleotide
gatgacggccatttggttagcccggaccaacggagtga

SEQ ID NO: 7269 - DNA, 35 bp, Artificial Sequence
  Synthetic oligonucleotide
gcacgaagccgtagatccttttggtcctgcaacaa

SEQ ID NO: 7270 - DNA, 36 bp, Artificial Sequence
  Synthetic oligonucleotide
gcccacacaactgaactgtcagggaggaccggatta

SEQ ID NO: 7271 - DNA, 38 bp, Artificial Sequence
  Synthetic oligonucleotide
ggacacagactgcagacgccacattttcgccttactga

SEQ ID NO: 7272 - DNA, 36 bp, Artificial Sequence
  Synthetic oligonucleotide
gttggcggagagggacatgagtcattcagataccga

SEQ ID NO: 7273 - DNA, 36 bp, Artificial Sequence
  Synthetic oligonucleotide
tacacacgcaggcggtcatgtggtcccacaaaagga

SEQ ID NO: 7274 - DNA, 35 bp, Artificial Sequence
  Synthetic oligonucleotide
tacgcacccccaggtctattccatccgtgatcgcg

SEQ ID NO: 7275 - DNA, 37 bp, Artificial Sequence
  Synthetic oligonucleotide
tacgccccagccgtatattatccaaataagttgacga

SEQ ID NO: 7276 - DNA, 36 bp, Artificial Sequence
  Synthetic oligonucleotide
tcatcgaggtcagggcgtaaatttacagcgtttcga

SEQ ID NO: 7277 - DNA, 35 bp, Artificial Sequence
  Synthetic oligonucleotide
tgatgccaagcggtgatcagtcagtccaaatgcac

SEQ ID NO: 7278 - DNA, 37 bp, Artificial Sequence
  Synthetic oligonucleotide
atcgcaaccaaggcacgtacaagggtctattgctcga

SEQ ID NO: 7279 - DNA, 35 bp, Artificial Sequence
  Synthetic oligonucleotide
atgacccccgccgtctatgagagccttactcttcg

SEQ ID NO: 7280 - DNA, 36 bp, Artificial Sequence
  Synthetic oligonucleotide
gaccgcaagatggcgccaggactgatctcggtgaca

SEQ ID NO: 7281 - DNA, 37 bp, Artificial Sequence
  Synthetic oligonucleotide
gatgcaccctaccacatgctagtcaacgatgccttga

SEQ ID NO: 7282 - DNA, 35 bp, Artificial Sequence
  Synthetic oligonucleotide
gcacacacgatgcgccaacacgacgtccgtctctc

SEQ ID NO: 7283 - DNA, 35 bp, Artificial Sequence
  Synthetic oligonucleotide
gccgcccagtcggcctaagctcgtagtcggagaaa

SEQ ID NO: 7284 - DNA, 37 bp, Artificial Sequence
  Synthetic oligonucleotide
tacgaagacgacaagcaagcagggtaacacggagcga

SEQ ID NO: 7285 - DNA, 35 bp, Artificial Sequence
  Synthetic oligonucleotide
tacgcacccgcaccacacgcatactcagctccaag

SEQ ID NO: 7286 - DNA, 35 bp, Artificial Sequence
  Synthetic oligonucleotide
tatgcgcacaagctatcgtgatcggcgccggtagg

SEQ ID NO: 7287 - DNA, 37 bp, Artificial Sequence
  Synthetic oligonucleotide
tcacacagctgagctaagtcgggaaggtcaaaattga

SEQ ID NO: 7288 - DNA, 36 bp, Artificial Sequence
  Synthetic oligonucleotide
tgtgagccgcagtaagtgaccatggagccgcaccaa

SEQ ID NO: 7289 - DNA, 36 bp, Artificial Sequence
  Synthetic oligonucleotide
aacgccacgacacaaatcatcgaaaacaaacgcgga

SEQ ID NO: 7290 - DNA, 37 bp, Artificial Sequence
  Synthetic oligonucleotide
acgcggtagcagaagggtgatcccgtgactatttgga

SEQ ID NO: 7291 - DNA, 35 bp, Artificial Sequence
  Synthetic oligonucleotide
atcgaatcgcggccgacggtacgcacacaaattag

SEQ ID NO: 7292 - DNA, 35 bp, Artificial Sequence
  Synthetic oligonucleotide
cctggggccacacacaggatgcactacatggcaat

SEQ ID NO: 7293 - DNA, 38 bp, Artificial Sequence
  Synthetic oligonucleotide
gacaccgggcaagagaggtccatgtgggaggggtttga

SEQ ID NO: 7294 - DNA, 35 bp, Artificial Sequence
  Synthetic oligonucleotide
gatggccccagcccgcatgatccactgaagcattg

SEQ ID NO: 7295 - DNA, 35 bp, Artificial Sequence
  Synthetic oligonucleotide
gccatcgaaccacgactgtccgattcacctcctcg

SEQ ID NO: 7296 - DNA, 36 bp, Artificial Sequence
  Synthetic oligonucleotide
ggagcgggcgtagacgggagttgcgcacgttcctaa

SEQ ID NO: 7297 - DNA, 35 bp, Artificial Sequence
  Synthetic oligonucleotide
gtggtgccaccacggatgcgagctaactgacaatg

SEQ ID NO: 7298 - DNA, 37 bp, Artificial Sequence
  Synthetic oligonucleotide
tacgcatggccctattcaataacgtctggcactccga

SEQ ID NO: 7299 - DNA, 37 bp, Artificial Sequence
  Synthetic oligonucleotide
tagacaaccaacttagccgacgcatcattgaagacga

SEQ ID NO: 7300 - DNA, 38 bp, Artificial Sequence
  Synthetic oligonucleotide
tgcaagccgaccgccagcccaacgaacccctcccttga

SEQ ID NO: 7301 - DNA, 37 bp, Artificial Sequence
  Synthetic oligonucleotide
gactgggcacgtgcacataaggctcgaggactttaga

SEQ ID NO: 7302 - DNA, 35 bp, Artificial Sequence
  Synthetic oligonucleotide
gcacaccgcacgcaagtaccccctcagtgctcaca

SEQ ID NO: 7303 - DNA, 38 bp, Artificial Sequence
  Synthetic oligonucleotide
gcaccagtcgccgttagtgctgatagaatccgttgtga

SEQ ID NO: 7304 - DNA, 36 bp, Artificial Sequence
  Synthetic oligonucleotide
gccgatagaccccgcacctgaatcaccgaccccgca

SEQ ID NO: 7305 - DNA, 38 bp, Artificial Sequence
  Synthetic oligonucleotide
gctcactgaccccgcccaatgtagttcatgaataatga

SEQ ID NO: 7306 - DNA, 37 bp, Artificial Sequence
  Synthetic oligonucleotide
aacgcgacatggctgtggacgtcaaattgtctaacga

SEQ ID NO: 7307 - DNA, 37 bp, Artificial Sequence
  Synthetic oligonucleotide
accaaactcagtagcatgcaggatgcctcgccaagga

SEQ ID NO: 7308 - DNA, 36 bp, Artificial Sequence
  Synthetic oligonucleotide
accaacgcaaccatcagtcagcctaacccgatccca

SEQ ID NO: 7309 - DNA, 35 bp, Artificial Sequence
  Synthetic oligonucleotide
accacaccacaaacctgtcaacgatggtcacacgc

SEQ ID NO: 7310 - DNA, 38 bp, Artificial Sequence
  Synthetic oligonucleotide
acgatgccacgtgtagcgcatatgagagaataacttga

SEQ ID NO: 7311 - DNA, 36 bp, Artificial Sequence
  Synthetic oligonucleotide
atcacgcaggacgcatcattgatattgaatgtcgga

SEQ ID NO: 7312 - DNA, 38 bp, Artificial Sequence
  Synthetic oligonucleotide
atgcacactgcaaattgtctcataaaggcggtagatga

SEQ ID NO: 7313 - DNA, 35 bp, Artificial Sequence
  Synthetic oligonucleotide
gaaaaatggggcgggtgatggttgggtgggacgta

SEQ ID NO: 7314 - DNA, 37 bp, Artificial Sequence
  Synthetic oligonucleotide
gacacacgcaaaaataaacttcgctccacgttaggga

SEQ ID NO: 7315 - DNA, 35 bp, Artificial Sequence
  Synthetic oligonucleotide
gacaccgcaggacgatccaaaccagtgctctcgga

SEQ ID NO: 7316 - DNA, 37 bp, Artificial Sequence
  Synthetic oligonucleotide
gaccgcgcaacgctacaacctgcagatcccgaccgga

SEQ ID NO: 7317 - DNA, 37 bp, Artificial Sequence
  Synthetic oligonucleotide
gcatgcacatacgacttcacagttacacaccttacga

SEQ ID NO: 7318 - DNA, 37 bp, Artificial Sequence
  Synthetic oligonucleotide
gtcactcacccgtagccttctaacccgcgaatctcga

SEQ ID NO: 7319 - DNA, 35 bp, Artificial Sequence
  Synthetic oligonucleotide
gtgggtgcccacacctcataacccgggaatgctgg

SEQ ID NO: 7320 - DNA, 38 bp, Artificial Sequence
  Synthetic oligonucleotide
tcacacagctacgtttgcaatgcgatcatttggaatga

SEQ ID NO: 7321 - DNA, 35 bp, Artificial Sequence
  Synthetic oligonucleotide
tccaggtcgtgcgtgacagaccttggaacgtaagc

SEQ ID NO: 7322 - DNA, 38 bp, Artificial Sequence
  Synthetic oligonucleotide
tgcgaactgcggtctacgcctactccatacatttgtga

SEQ ID NO: 7323 - DNA, 35 bp, Artificial Sequence
  Synthetic oligonucleotide
acaacaccgcccccccgtcctcgatccataaacgt

SEQ ID NO: 7324 - DNA, 36 bp, Artificial Sequence
  Synthetic oligonucleotide
agggcacaacgcgtataacagagactcgcttgtgga

SEQ ID NO: 7325 - DNA, 38 bp, Artificial Sequence
  Synthetic oligonucleotide
atcagcccggttcattcgacttatacatcataaaatga

SEQ ID NO: 7326 - DNA, 36 bp, Artificial Sequence
  Synthetic oligonucleotide
atcagcctgtccaaccgcctacaaccgacccataca

SEQ ID NO: 7327 - DNA, 35 bp, Artificial Sequence
  Synthetic oligonucleotide
atgctggcccctcgataaacgcccccgatagacgt

SEQ ID NO: 7328 - DNA, 35 bp, Artificial Sequence
  Synthetic oligonucleotide
gacgaacgaagacggcatatagacgaggattgatg

SEQ ID NO: 7329 - DNA, 37 bp, Artificial Sequence
  Synthetic oligonucleotide
gatggcgcatgagggagctgaattgcgaggtgagaga

SEQ ID NO: 7330 - DNA, 35 bp, Artificial Sequence
  Synthetic oligonucleotide
gcacccccactgctgctttcgtgactccccatgta

SEQ ID NO: 7331 - DNA, 36 bp, Artificial Sequence
  Synthetic oligonucleotide
gcacgagcaagtcaagaattgggattgttgcacaca

SEQ ID NO: 7332 - DNA, 35 bp, Artificial Sequence
  Synthetic oligonucleotide
gcccacctccatataagttccgaaatctaacaggg

SEQ ID NO: 7333 - DNA, 37 bp, Artificial Sequence
  Synthetic oligonucleotide
gcgaacccatagcaggcatagagcccactccgacaga

SEQ ID NO: 7334 - DNA, 37 bp, Artificial Sequence
  Synthetic oligonucleotide
gtcgaggctggaagaatagaggtattgcgagctatga

SEQ ID NO: 7335 - DNA, 37 bp, Artificial Sequence
  Synthetic oligonucleotide
tccacccgcagacggacttaggaatctaaccacctga

SEQ ID NO: 7336 - DNA, 35 bp, Artificial Sequence
  Synthetic oligonucleotide
tgtagccgcccctcattgctgaaaatgatctactg

SEQ ID NO: 7337 - DNA, 38 bp, Artificial Sequence
  Synthetic oligonucleotide
actgccaccgcggacaacatcgcacggatcattcgtga

SEQ ID NO: 7338 - DNA, 35 bp, Artificial Sequence
  Synthetic oligonucleotide
atgcacctcaggcttgcactggcctattccaccga

SEQ ID NO: 7339 - DNA, 35 bp, Artificial Sequence
  Synthetic oligonucleotide
gacaacgtgcgtgctcgaagagtgtatcattttca

SEQ ID NO: 7340 - DNA, 37 bp, Artificial Sequence
  Synthetic oligonucleotide
gacacctacagaggcgtcatggataggtgtcacgtga

SEQ ID NO: 7341 - DNA, 38 bp, Artificial Sequence
  Synthetic oligonucleotide
gacccgtgaggtcgcgtactaatcggcactgactgtga

SEQ ID NO: 7342 - DNA, 35 bp, Artificial Sequence
  Synthetic oligonucleotide
gagcgggacgggcggaatatagaggtctcccactg

SEQ ID NO: 7343 - DNA, 37 bp, Artificial Sequence
  Synthetic oligonucleotide
gcaaaactgaccccgcaaccccgcccccggttcacga

SEQ ID NO: 7344 - DNA, 35 bp, Artificial Sequence
  Synthetic oligonucleotide
gccacccacgaaggaattacacacccgcacacgct

SEQ ID NO: 7345 - DNA, 37 bp, Artificial Sequence
  Synthetic oligonucleotide
gcgacgcaaaggctcaggtgtcatgactgcggcttga

SEQ ID NO: 7346 - DNA, 36 bp, Artificial Sequence
  Synthetic oligonucleotide
gctgacggctcaagctatacgatggcgtatcgacta

SEQ ID NO: 7347 - DNA, 35 bp, Artificial Sequence
  Synthetic oligonucleotide
gtagcacaatcacgagaagagttagatagttcatg

SEQ ID NO: 7348 - DNA, 38 bp, Artificial Sequence
  Synthetic oligonucleotide
gtcaagccatctacacatccattcagtcatcccaatga

SEQ ID NO: 7349 - DNA, 36 bp, Artificial Sequence
  Synthetic oligonucleotide
gtgaccgcacctacggataaaacggacctgatcgta

SEQ ID NO: 7350 - DNA, 35 bp, Artificial Sequence
  Synthetic oligonucleotide
tacacacgccaggaattaaagctaggagcctacgc

SEQ ID NO: 7351 - DNA, 36 bp, Artificial Sequence
  Synthetic oligonucleotide
tacgggaggcatgtgatcggacagtaagagctgtga

SEQ ID NO: 7352 - DNA, 35 bp, Artificial Sequence
  Synthetic oligonucleotide
accacgtcgggaatagacgtacgctttaaggaaac

SEQ ID NO: 7353 - DNA, 35 bp, Artificial Sequence
  Synthetic oligonucleotide
atgcacgcaatctctcaccgaccgcactgcccacg

SEQ ID NO: 7354 - DNA, 37 bp, Artificial Sequence
  Synthetic oligonucleotide
cgatggcgtactggctagtcggcatattacgtatcga

SEQ ID NO: 7355 - DNA, 36 bp, Artificial Sequence
  Synthetic oligonucleotide
gaccacgagcatcaactgagtggctttcgacgagga

SEQ ID NO: 7356 - DNA, 38 bp, Artificial Sequence
  Synthetic oligonucleotide
gacgacggggtcgcggctgttaggcatgaacccattga

SEQ ID NO: 7357 - DNA, 35 bp, Artificial Sequence
  Synthetic oligonucleotide
gacggaccacgcatcatcgtgaaggacggatcagt

SEQ ID NO: 7358 - DNA, 38 bp, Artificial Sequence
  Synthetic oligonucleotide
gcacaggccctgtatgtgtaacatgatgacctctttga

SEQ ID NO: 7359 - DNA, 35 bp, Artificial Sequence
  Synthetic oligonucleotide
gcacgccgcaggggtgcagaaacagtaatgcaagt

SEQ ID NO: 7360 - DNA, 36 bp, Artificial Sequence
  Synthetic oligonucleotide
gccacatgctgcaggagtacagaagatttcagccaa

SEQ ID NO: 7361 - DNA, 38 bp, Artificial Sequence
  Synthetic oligonucleotide
gccacgagagtataacgtggtcagtccatttgacatga

SEQ ID NO: 7362 - DNA, 37 bp, Artificial Sequence
  Synthetic oligonucleotide
gccatgctgggcacgtgtatccgaaagtttcattcga

SEQ ID NO: 7363 - DNA, 38 bp, Artificial Sequence
  Synthetic oligonucleotide
gcccgaagcgtccataggttttccaattgtcagtttga

SEQ ID NO: 7364 - DNA, 36 bp, Artificial Sequence
  Synthetic oligonucleotide
ggacacgcacgtgtccagctcccaagctgctcctca

SEQ ID NO: 7365 - DNA, 35 bp, Artificial Sequence
  Synthetic oligonucleotide
tagcgacgcaaaggcatcagagtggcttccgtggc

SEQ ID NO: 7366 - DNA, 35 bp, Artificial Sequence
  Synthetic oligonucleotide
tcaccccgccaaaccacgctctaggactagcggag

SEQ ID NO: 7367 - DNA, 36 bp, Artificial Sequence
  Synthetic oligonucleotide
tcatacgccaggaactgaaaggacaaggtttacgta

SEQ ID NO: 7368 - DNA, 35 bp, Artificial Sequence
  Synthetic oligonucleotide
tgacgaggagcagagttgtcattcgtcaggtatcg

SEQ ID NO: 7369 - DNA, 36 bp, Artificial Sequence
  Synthetic oligonucleotide
tgagcaacgctgcgttcacgtaatgattctctcgaa

SEQ ID NO: 7370 - DNA, 35 bp, Artificial Sequence
  Synthetic oligonucleotide
ttgcgcacgcagatcgtaacccccactgccccaac

SEQ ID NO: 7371 - DNA, 37 bp, Artificial Sequence
  Synthetic oligonucleotide
aacacgtgactgcacagaccaaggagagacttaatga

SEQ ID NO: 7372 - DNA, 38 bp, Artificial Sequence
  Synthetic oligonucleotide
aatgccgccaccagactagaaggtgtactcagatgtga

SEQ ID NO: 7373 - DNA, 36 bp, Artificial Sequence
  Synthetic oligonucleotide
accacgccaagctagctgtaccttatctgtcctcga

SEQ ID NO: 7374 - DNA, 35 bp, Artificial Sequence
  Synthetic oligonucleotide
accccgtgaaggaagcgcatctggatgacagtgac

SEQ ID NO: 7375 - DNA, 35 bp, Artificial Sequence
  Synthetic oligonucleotide
acgcacaacagtcgtgatgtctacattcccatatc

SEQ ID NO: 7376 - DNA, 38 bp, Artificial Sequence
  Synthetic oligonucleotide
actgcgaaccggccaacaagtgtattggttgatcctga

SEQ ID NO: 7377 - DNA, 37 bp, Artificial Sequence
  Synthetic oligonucleotide
attggcgcaaagcagtgtgcttatagagataggatga

SEQ ID NO: 7378 - DNA, 35 bp, Artificial Sequence
  Synthetic oligonucleotide
cactcaaacgacctgccgctagtgattagaacacg

SEQ ID NO: 7379 - DNA, 35 bp, Artificial Sequence
  Synthetic oligonucleotide
gacaggtcgggacggtcaacgcgttctcacataac

SEQ ID NO: 7380 - DNA, 36 bp, Artificial Sequence
  Synthetic oligonucleotide
gagaccaagcaacgatattccattgtgaggcgtgta

SEQ ID NO: 7381 - DNA, 35 bp, Artificial Sequence
  Synthetic oligonucleotide
gagccccagccacacctcaaagccgcaccaaccta

SEQ ID NO: 7382 - DNA, 36 bp, Artificial Sequence
  Synthetic oligonucleotide
gagctgcatcgggggcaaaagtaggagcgatcgtta

SEQ ID NO: 7383 - DNA, 35 bp, Artificial Sequence
  Synthetic oligonucleotide
gatgccatagccccagacatttgaacaatttacgc

SEQ ID NO: 7384 - DNA, 35 bp, Artificial Sequence
  Synthetic oligonucleotide
gatggagcgcgagctatacaagtaggaaggtcagc

SEQ ID NO: 7385 - DNA, 36 bp, Artificial Sequence
  Synthetic oligonucleotide
gcagaccacagacactcaaaatttgcttcaatacca

SEQ ID NO: 7386 - DNA, 37 bp, Artificial Sequence
  Synthetic oligonucleotide
gtgcgcacgagattatcataacccgtcttcacacgga

SEQ ID NO: 7387 - DNA, 38 bp, Artificial Sequence
  Synthetic oligonucleotide
tacatacgcaggtgcctggaatgaagtgagctatttga

SEQ ID NO: 7388 - DNA, 37 bp, Artificial Sequence
  Synthetic oligonucleotide
tacgagggtgcgtttaaagtatgtgttcatgacaaga

SEQ ID NO: 7389 - DNA, 35 bp, Artificial Sequence
  Synthetic oligonucleotide
tagccgcataccgttcaagccccccgtccccgtgt

SEQ ID NO: 7390 - DNA, 35 bp, Artificial Sequence
  Synthetic oligonucleotide
tgacaccgcataagttcgcattaaggccatcgttc

SEQ ID NO: 7391 - DNA, 38 bp, Artificial Sequence
  Synthetic oligonucleotide
tgccacaaacgcgcaagggtgctaggcaaggggactga

SEQ ID NO: 7392 - DNA, 36 bp, Artificial Sequence
  Synthetic oligonucleotide
aacaacactgaccccgatccaaataacttgaccgga

SEQ ID NO: 7393 - DNA, 35 bp, Artificial Sequence
  Synthetic oligonucleotide
acaactgcgcactctgcttgaaggatagatttatt

SEQ ID NO: 7394 - DNA, 35 bp, Artificial Sequence
  Synthetic oligonucleotide
gaacacgtgggcgaaaagggacgggatgggctagt

SEQ ID NO: 7395 - DNA, 38 bp, Artificial Sequence
  Synthetic oligonucleotide
gacgcacgtcgcgtagtgcagcacgttcagtcaattca

SEQ ID NO: 7396 - DNA, 37 bp, Artificial Sequence
  Synthetic oligonucleotide
gactgacacgcatccaaccgcagaaatgtcatttcga

SEQ ID NO: 7397 - DNA, 37 bp, Artificial Sequence
  Synthetic oligonucleotide
gcacacgtaggaacggtgaagtaggagatagataaga

SEQ ID NO: 7398 - DNA, 35 bp, Artificial Sequence
  Synthetic oligonucleotide
tcacgaactggtcagtcaattgacagacgcaaagg

SEQ ID NO: 7399 - DNA, 38 bp, Artificial Sequence
  Synthetic oligonucleotide
tcccgctccgaggtgtcggaccaccctcctctcggaga

SEQ ID NO: 7400 - DNA, 35 bp, Artificial Sequence
  Synthetic oligonucleotide
tgcgatgcaccggtatatccaacagagaaggtcgc

SEQ ID NO: 7401 - DNA, 37 bp, Artificial Sequence
  Synthetic oligonucleotide
aacactgccaggccaacatgctttatgtcgaaacgga

SEQ ID NO: 7402 - DNA, 35 bp, Artificial Sequence
  Synthetic oligonucleotide
aacgcaacacggttcaatgcgaaatcaggacgtga

SEQ ID NO: 7403 - DNA, 37 bp, Artificial Sequence
  Synthetic oligonucleotide
aagggacgcacccaggcattctagaagtcttgggaga

SEQ ID NO: 7404 - DNA, 36 bp, Artificial Sequence
  Synthetic oligonucleotide
acacaggggcaccctactgttaatgccaccgacgaa

SEQ ID NO: 7405 - DNA, 36 bp, Artificial Sequence
  Synthetic oligonucleotide
acactgaccctgagatgacgctaacagaaccccgca

SEQ ID NO: 7406 - DNA, 35 bp, Artificial Sequence
  Synthetic oligonucleotide
atccaaacccccccccacacagaccccgaggcgtt

SEQ ID NO: 7407 - DNA, 38 bp, Artificial Sequence
  Synthetic oligonucleotide
gacgggccgcatcacagcacaaccactcacatctgtga

SEQ ID NO: 7408 - DNA, 38 bp, Artificial Sequence
  Synthetic oligonucleotide
gactgacagatgtatcgaactcaagatggggggattga

SEQ ID NO: 7409 - DNA, 36 bp, Artificial Sequence
  Synthetic oligonucleotide
gcatgccaaccaatcgttccctaagggcgatactta

SEQ ID NO: 7410 - DNA, 36 bp, Artificial Sequence
  Synthetic oligonucleotide
gccgaccacagggtgctccatcttgtcacttttcca

SEQ ID NO: 7411 - DNA, 35 bp, Artificial Sequence
  Synthetic oligonucleotide
gcctaccgagcaacctgtacgaggccattcttgaa

SEQ ID NO: 7412 - DNA, 35 bp, Artificial Sequence
  Synthetic oligonucleotide
gctacccacaacgcacatcacatctgcatactcgg

SEQ ID NO: 7413 - DNA, 38 bp, Artificial Sequence
  Synthetic oligonucleotide
gtcgtaaccgcacacgtctatactcaccaagactgtga

SEQ ID NO: 7414 - DNA, 35 bp, Artificial Sequence
  Synthetic oligonucleotide
gtggacacacgaaagtggaaaccatgcctgactta

SEQ ID NO: 7415 - DNA, 38 bp, Artificial Sequence
  Synthetic oligonucleotide
tatgcctcgctgctacacccgaccccgctactgtttga

SEQ ID NO: 7416 - DNA, 35 bp, Artificial Sequence
  Synthetic oligonucleotide
ttggcccaccaaacgtctatcatcccaaagttaga

SEQ ID NO: 7417 - DNA, 35 bp, Artificial Sequence
  Synthetic oligonucleotide
aaccacccactcggtccacgtcgtctcacacacgc

SEQ ID NO: 7418 - DNA, 37 bp, Artificial Sequence
  Synthetic oligonucleotide
acacacggtgagggccagctactactgtagtactaga

SEQ ID NO: 7419 - DNA, 35 bp, Artificial Sequence
  Synthetic oligonucleotide
ggacccagcaccgcaatacagcactgtaacaccac

SEQ ID NO: 7420 - DNA, 36 bp, Artificial Sequence
  Synthetic oligonucleotide
gtcaagagcaactcgcagttgtcatccctcactgta

SEQ ID NO: 7421 - DNA, 36 bp, Artificial Sequence
  Synthetic oligonucleotide
accgacagtcacacacaggtacgcgggggcaccata

SEQ ID NO: 7422 - DNA, 35 bp, Artificial Sequence
  Synthetic oligonucleotide
atcgcgccaggatacccactattacttcacaggtg

SEQ ID NO: 7423 - DNA, 37 bp, Artificial Sequence
  Synthetic oligonucleotide
atgtgccggacaggtgcgcaaagctatatcccttcga

SEQ ID NO: 7424 - DNA, 38 bp, Artificial Sequence
  Synthetic oligonucleotide
catccgccgaaatgggatcgtaccgggggtctgtctga

SEQ ID NO: 7425 - DNA, 35 bp, Artificial Sequence
  Synthetic oligonucleotide
gacacccgtaggtagtgtcaagggaacagggagca

SEQ ID NO: 7426 - DNA, 37 bp, Artificial Sequence
  Synthetic oligonucleotide
gccatgtgaggcgtggtgtgggaatcagtttaggcga

SEQ ID NO: 7427 - DNA, 35 bp, Artificial Sequence
  Synthetic oligonucleotide
gcgcgagcacgggactgcaaggcgttgtagatcta

SEQ ID NO: 7428 - DNA, 35 bp, Artificial Sequence
  Synthetic oligonucleotide
gtagcggaaggcggtcggtctccctcttgtacttg

SEQ ID NO: 7429 - DNA, 36 bp, Artificial Sequence
  Synthetic oligonucleotide
gtgcgaaccgctgggtcgagccgcaacgaaacgcta

SEQ ID NO: 7430 - DNA, 37 bp, Artificial Sequence
  Synthetic oligonucleotide
gtgcgacatgtgtcttagccccatcgagatcaactga

SEQ ID NO: 7431 - DNA, 36 bp, Artificial Sequence
  Synthetic oligonucleotide
taccaccggtggatctagccttatgcccttccatca

SEQ ID NO: 7432 - DNA, 35 bp, Artificial Sequence
  Synthetic oligonucleotide
tgcgaagcactaccccagttatgtggtcttttctc

SEQ ID NO: 7433 - DNA, 38 bp, Artificial Sequence
  Synthetic oligonucleotide
agaccagacgcaactgtagagtgatgtacttgtattga

SEQ ID NO: 7434 - DNA, 37 bp, Artificial Sequence
  Synthetic oligonucleotide
atgcactgcgccaaactgatatgtagggttacacgga

SEQ ID NO: 7435 - DNA, 37 bp, Artificial Sequence
  Synthetic oligonucleotide
gaccacgcttgattccacacaggatacgtgatgtaga

SEQ ID NO: 7436 - DNA, 37 bp, Artificial Sequence
  Synthetic oligonucleotide
gaccgcccagccgttatgttcactcttaaagcctaga

SEQ ID NO: 7437 - DNA, 38 bp, Artificial Sequence
  Synthetic oligonucleotide
gacgacgtgggcatttagtcaatcgtatgccataatga

SEQ ID NO: 7438 - DNA, 36 bp, Artificial Sequence
  Synthetic oligonucleotide
gacgaggtccaggcgcttatacagaatcggtgcctg

SEQ ID NO: 7439 - DNA, 35 bp, Artificial Sequence
  Synthetic oligonucleotide
gacgtgggcaacgtgttgacaatgggatgacatgt

SEQ ID NO: 7440 - DNA, 35 bp, Artificial Sequence
  Synthetic oligonucleotide
gccacccaccatcacgcctccagtcgttaacgcgt

SEQ ID NO: 7441 - DNA, 36 bp, Artificial Sequence
  Synthetic oligonucleotide
gcgccgtcccccagtggtaacgtccacttattcgca

SEQ ID NO: 7442 - DNA, 35 bp, Artificial Sequence
  Synthetic oligonucleotide
ggtgcatcgccgcaacagatctaaccatagaggtc

SEQ ID NO: 7443 - DNA, 37 bp, Artificial Sequence
  Synthetic oligonucleotide
tatgcggaggccgagctctatacaaactggggtggaa

SEQ ID NO: 7444 - DNA, 35 bp, Artificial Sequence
  Synthetic oligonucleotide
tccaccggacgcagttcgcatgaacttttcagttt

SEQ ID NO: 7445 - DNA, 38 bp, Artificial Sequence
  Synthetic oligonucleotide
acaccatgcatatcagtttttcgccgtagtcactctga

SEQ ID NO: 7446 - DNA, 37 bp, Artificial Sequence
  Synthetic oligonucleotide
atgcgcagaagtcgtgaaagtcccgggtttgtgtgga

SEQ ID NO: 7447 - DNA, 38 bp, Artificial Sequence
  Synthetic oligonucleotide
gaccaacctcaccgactgcgtagagaggacgaatgtga

SEQ ID NO: 7448 - DNA, 35 bp, Artificial Sequence
  Synthetic oligonucleotide
gacgacggagtcgacactgctcacccttgaatatt

SEQ ID NO: 7449 - DNA, 36 bp, Artificial Sequence
  Synthetic oligonucleotide
gatcgacgacgtacactgctagcatttgctcctcga

SEQ ID NO: 7450 - DNA, 36 bp, Artificial Sequence
  Synthetic oligonucleotide
gcgaaccagcacccgggaccagttgcgtacaattta

SEQ ID NO: 7451 - DNA, 36 bp, Artificial Sequence
  Synthetic oligonucleotide
gcgatagcacacgcattgccgttaactagccaagca

SEQ ID NO: 7452 - DNA, 35 bp, Artificial Sequence
  Synthetic oligonucleotide
gtacaccgcaacacgtaggacttagcgtagctggg

SEQ ID NO: 7453 - DNA, 35 bp, Artificial Sequence
  Synthetic oligonucleotide
tatcaggctagtgtcctcgtgagaatcctgcgaac

SEQ ID NO: 7454 - DNA, 35 bp, Artificial Sequence
  Synthetic oligonucleotide
tcaacaccacgtatagggttgtttctttttaacgt

SEQ ID NO: 7455 - DNA, 37 bp, Artificial Sequence
  Synthetic oligonucleotide
tcagaccggccacgagggaggagtgaatacgttatga

SEQ ID NO: 7456 - DNA, 35 bp, Artificial Sequence
  Synthetic oligonucleotide
ttcgcagtccgtcgctgattggtacacacgccctt

SEQ ID NO: 7457 - DNA, 35 bp, Artificial Sequence
  Synthetic oligonucleotide
ttgcgaagcacatgctgttaccgtgacccgcctcc

SEQ ID NO: 7458 - DNA, 35 bp, Artificial Sequence
  Synthetic oligonucleotide
gacaacgggcataggtagcatcgcttaatggagct

SEQ ID NO: 7459 - DNA, 36 bp, Artificial Sequence
  Synthetic oligonucleotide
gacacaagcgtggaacgtgatgcagccgatcgggta

SEQ ID NO: 7460 - DNA, 36 bp, Artificial Sequence
  Synthetic oligonucleotide
gacgacgcacatgtccatatagcaaaccgatcacta

SEQ ID NO: 7461 - DNA, 37 bp, Artificial Sequence
  Synthetic oligonucleotide
gcacagtgcgtaggggcgacgaaagacactggaatga

SEQ ID NO: 7462 - DNA, 35 bp, Artificial Sequence
  Synthetic oligonucleotide
gccacagtcgggccctgatctgaagaggagttatg

SEQ ID NO: 7463 - DNA, 35 bp, Artificial Sequence
  Synthetic oligonucleotide
gcgagagctgccggaggagacgtggccacacatat

SEQ ID NO: 7464 - DNA, 37 bp, Artificial Sequence
  Synthetic oligonucleotide
gctgtgcacggctcggtgtctgttcagtgtatgcgga

SEQ ID NO: 7465 - DNA, 37 bp, Artificial Sequence
  Synthetic oligonucleotide
tagcgcaagccgtgaggacgccagctctaagcgtaga

SEQ ID NO: 7466 - DNA, 36 bp, Artificial Sequence
  Synthetic oligonucleotide
tgacaacgcacctccgctttagccaccacacacgca

SEQ ID NO: 7467 - DNA, 37 bp, Artificial Sequence
  Synthetic oligonucleotide
ttaaccaccgcaaatcagtaatcacgcctggtcttga

SEQ ID NO: 7468 - DNA, 35 bp, Artificial Sequence
  Synthetic oligonucleotide
aatgcgacacggaggttggagatagtatggcggtc

SEQ ID NO: 7469 - DNA, 38 bp, Artificial Sequence
  Synthetic oligonucleotide
acacgcagacaatgagtttgcgtgtattgttcatttga

SEQ ID NO: 7470 - DNA, 36 bp, Artificial Sequence
  Synthetic oligonucleotide
actgaccccggactagaacccccaggatctcttcga

SEQ ID NO: 7471 - DNA, 36 bp, Artificial Sequence
  Synthetic oligonucleotide
agcgacgccggggttctaaaacgtctatcgtgcaca

SEQ ID NO: 7472 - DNA, 36 bp, Artificial Sequence
  Synthetic oligonucleotide
cacaaccactcatccatggaccgccttggtagggta

SEQ ID NO: 7473 - DNA, 37 bp, Artificial Sequence
  Synthetic oligonucleotide
gacggaggtcacgacacagtaggcatgagaccgggga

SEQ ID NO: 7474 - DNA, 35 bp, Artificial Sequence
  Synthetic oligonucleotide
gagacgcacggaagtgtaaccacacgtcgtcaccg

SEQ ID NO: 7475 - DNA, 36 bp, Artificial Sequence
  Synthetic oligonucleotide
gatcgataccgcatacccactgaccctgcctcacaa

SEQ ID NO: 7476 - DNA, 35 bp, Artificial Sequence
  Synthetic oligonucleotide
gcaacaagaggtgtaggattgcgccgtctgtactg

SEQ ID NO: 7477 - DNA, 35 bp, Artificial Sequence
  Synthetic oligonucleotide
gcactgccacatgggtgcctctataccctggtccg

SEQ ID NO: 7478 - DNA, 37 bp, Artificial Sequence
  Synthetic oligonucleotide
gcgatccctcaacataccggagacgtgcccacatcga

SEQ ID NO: 7479 - DNA, 35 bp, Artificial Sequence
  Synthetic oligonucleotide
tactgaccccgagacgggacaaccgttcttacgtg

SEQ ID NO: 7480 - DNA, 37 bp, Artificial Sequence
  Synthetic oligonucleotide
tcaccacgtaaggcttgtgcacctcgaagcagtgaga

SEQ ID NO: 7481 - DNA, 37 bp, Artificial Sequence
  Synthetic oligonucleotide
acagccactgcgaaccctaaccattccgagctgcaga

SEQ ID NO: 7482 - DNA, 37 bp, Artificial Sequence
  Synthetic oligonucleotide
agacgtggcggaaaggggagaagtggccgaggggaga

SEQ ID NO: 7483 - DNA, 35 bp, Artificial Sequence
  Synthetic oligonucleotide
atccacgcaaagtacccaccgcacccaccacagga

SEQ ID NO: 7484 - DNA, 36 bp, Artificial Sequence
  Synthetic oligonucleotide
gacgcgcgcacgctggagtaagcaacttgtggtaga

SEQ ID NO: 7485 - DNA, 38 bp, Artificial Sequence
  Synthetic oligonucleotide
gcacaagcactacctaagagtcgatagctcaaatctga

SEQ ID NO: 7486 - DNA, 36 bp, Artificial Sequence
  Synthetic oligonucleotide
gcaccacccatgatgtaaccctggagcccactcaca

SEQ ID NO: 7487 - DNA, 36 bp, Artificial Sequence
  Synthetic oligonucleotide
gtcgcagactgtccgttctctttctcatgtctccaa

SEQ ID NO: 7488 - DNA, 38 bp, Artificial Sequence
  Synthetic oligonucleotide
tgatgcgaccaacggatgtcgtcctttccaggccctga

SEQ ID NO: 7489 - DNA, 35 bp, Artificial Sequence
  Synthetic oligonucleotide
aaccgccatacggaagtcctaaaccgcgtgccccg

SEQ ID NO: 7490 - DNA, 36 bp, Artificial Sequence
  Synthetic oligonucleotide
accgcgggcaagcaaaacctccgtgtgatcttatca

SEQ ID NO: 7491 - DNA, 36 bp, Artificial Sequence
  Synthetic oligonucleotide
gagcccggtgggaacacgatgctctccatgggtgga

SEQ ID NO: 7492 - DNA, 35 bp, Artificial Sequence
  Synthetic oligonucleotide
gatgacgggtcaaccgctagtaacgcaacaacact

SEQ ID NO: 7493 - DNA, 35 bp, Artificial Sequence
  Synthetic oligonucleotide
ggtgccaaccgccgttccatacctcgacgacatac

SEQ ID NO: 7494 - DNA, 36 bp, Artificial Sequence
  Synthetic oligonucleotide
taccactgccgaatgcgcccttcgtacaatcctcca

SEQ ID NO: 7495 - DNA, 37 bp, Artificial Sequence
  Synthetic oligonucleotide
tcagcaactggatgacgtatctgacagcactcataga

SEQ ID NO: 7496 - DNA, 38 bp, Artificial Sequence
  Synthetic oligonucleotide
tgcatgcaccaacttcactcgatacgaacccaatgtga

SEQ ID NO: 7497 - DNA, 35 bp, Artificial Sequence
  Synthetic oligonucleotide
acactgaccccgaggacgatatcttgcggttaatc

SEQ ID NO: 7498 - DNA, 36 bp, Artificial Sequence
  Synthetic oligonucleotide
gacaaatcgcaaggaggggcggtcagtcatctagga

SEQ ID NO: 7499 - DNA, 37 bp, Artificial Sequence
  Synthetic oligonucleotide
gacacctccacgttctcatgcgccctagccatattga

SEQ ID NO: 7500 - DNA, 35 bp, Artificial Sequence
  Synthetic oligonucleotide
gacacgaagcgtattaacttcggcccacatcctgg

SEQ ID NO: 7501 - DNA, 37 bp, Artificial Sequence
  Synthetic oligonucleotide
gacacgggcgggtctaagtacggtacgggtcagtcga

SEQ ID NO: 7502 - DNA, 38 bp, Artificial Sequence
  Synthetic oligonucleotide
gacgccaccggaacacgaggtccagtatcattaggtga

SEQ ID NO: 7503 - DNA, 36 bp, Artificial Sequence
  Synthetic oligonucleotide
gagacgcacaggacatgtaactctcgccttctccta

SEQ ID NO: 7504 - DNA, 38 bp, Artificial Sequence
  Synthetic oligonucleotide
gagcaacgagtcagtgtagtcaataagctcgacgttga

SEQ ID NO: 7505 - DNA, 38 bp, Artificial Sequence
  Synthetic oligonucleotide
gatcacgccactgacagtgtacccgatgatagacttga

SEQ ID NO: 7506 - DNA, 35 bp, Artificial Sequence
  Synthetic oligonucleotide
gccggaacgctgaaggacttaggccttccttacca

SEQ ID NO: 7507 - DNA, 38 bp, Artificial Sequence
  Synthetic oligonucleotide
ggacggtgtccgaatgatgtaaatggagcccctcgtga

SEQ ID NO: 7508 - DNA, 35 bp, Artificial Sequence
  Synthetic oligonucleotide
gtgacctgtcgaaggagcacggactgcaggtgttt

SEQ ID NO: 7509 - DNA, 38 bp, Artificial Sequence
  Synthetic oligonucleotide
tagccagtgccggtatatacagcctgagtgggtgttga

SEQ ID NO: 7510 - DNA, 37 bp, Artificial Sequence
  Synthetic oligonucleotide
tgcccatgtgcagacgcggctttgtctcaggtatgga

SEQ ID NO: 7511 - DNA, 35 bp, Artificial Sequence
  Synthetic oligonucleotide
tgctgcaccgcacaaggtctgtgagctctaaccta

SEQ ID NO: 7512 - DNA, 36 bp, Artificial Sequence
  Synthetic oligonucleotide
tgtgcggagcatgtgttactaagctcatagtgcgaa

SEQ ID NO: 7513 - DNA, 38 bp, Artificial Sequence
  Synthetic oligonucleotide
aatccgcaacagcacgccgctactccgactacccatga

SEQ ID NO: 7514 - DNA, 38 bp, Artificial Sequence
  Synthetic oligonucleotide
agcgcacagccgtacagcagaacggtatgatagcatga

SEQ ID NO: 7515 - DNA, 38 bp, Artificial Sequence
  Synthetic oligonucleotide
atcaccggatggtataaccttcgctctcaggtcgctga

SEQ ID NO: 7516 - DNA, 35 bp, Artificial Sequence
  Synthetic oligonucleotide
atcgcgagcagaaaaagcgtgatgtcagggggctc

SEQ ID NO: 7517 - DNA, 37 bp, Artificial Sequence
  Synthetic oligonucleotide
gaccacacgcctgtagttaccgtgtcactcatcggga

SEQ ID NO: 7518 - DNA, 36 bp, Artificial Sequence
  Synthetic oligonucleotide
gagcggggttccacggagagtggcctcgatcgcgta

SEQ ID NO: 7519 - DNA, 37 bp, Artificial Sequence
  Synthetic oligonucleotide
gatgccgagggggccaacggacgtcaaatatcgtcga

SEQ ID NO: 7520 - DNA, 35 bp, Artificial Sequence
  Synthetic oligonucleotide
gcaacacccgtcaaacacacaacaaacgcttccag

SEQ ID NO: 7521 - DNA, 37 bp, Artificial Sequence
  Synthetic oligonucleotide
gcacgcaaacacagcgtaggagagtagtgtacttcga

SEQ ID NO: 7522 - DNA, 35 bp, Artificial Sequence
  Synthetic oligonucleotide
gcatacgccccggagaatcctgcgatgggcgttac

SEQ ID NO: 7523 - DNA, 35 bp, Artificial Sequence
  Synthetic oligonucleotide
ggacacaacgggcacggatgcaaatgactcttctt

SEQ ID NO: 7524 - DNA, 36 bp, Artificial Sequence
  Synthetic oligonucleotide
tcacgcggtgaacggtaggagggccagagaggtcaa

SEQ ID NO: 7525 - DNA, 35 bp, Artificial Sequence
  Synthetic oligonucleotide
tcatgcgactccggacctgaccctgccactttaac

SEQ ID NO: 7526 - DNA, 37 bp, Artificial Sequence
  Synthetic oligonucleotide
tgacaacgctgagggttgaaggcgctgatcagacgga

SEQ ID NO: 7527 - DNA, 35 bp, Artificial Sequence
  Synthetic oligonucleotide
tgcgaccgtagagtgaacgggcaagggcttaatcg

SEQ ID NO: 7528 - DNA, 38 bp, Artificial Sequence
  Synthetic oligonucleotide
acacgaggacagagcaattcgtgacaacggatacgtga

SEQ ID NO: 7529 - DNA, 38 bp, Artificial Sequence
  Synthetic oligonucleotide
acatgcaggcctcccgtcgattgtatcagtgaccctga

SEQ ID NO: 7530 - DNA, 35 bp, Artificial Sequence
  Synthetic oligonucleotide
actcacgcccactttcgtatgttgtctgtgttatt

SEQ ID NO: 7531 - DNA, 38 bp, Artificial Sequence
  Synthetic oligonucleotide
agtacgcaccccgcttatacttcaaacaaccccgctga

SEQ ID NO: 7532 - DNA, 35 bp, Artificial Sequence
  Synthetic oligonucleotide
gacgccgaaggttacgcttcatagccgaggctctt

SEQ ID NO: 7533 - DNA, 38 bp, Artificial Sequence
  Synthetic oligonucleotide
gacgctagggccgggagttcaacgggagtcgtgcttga

SEQ ID NO: 7534 - DNA, 34 bp, Artificial Sequence
  Synthetic oligonucleotide
gcacaacgcaccctacatatgacccgtcgactca

SEQ ID NO: 7535 - DNA, 35 bp, Artificial Sequence
  Synthetic oligonucleotide
gccggagcctcatccttaccggcaaatatgttttt

SEQ ID NO: 7536 - DNA, 35 bp, Artificial Sequence
  Synthetic oligonucleotide
tctagacccgacgtaggcgtttgaaggcgggtctc

SEQ ID NO: 7537 - DNA, 36 bp, Artificial Sequence
  Synthetic oligonucleotide
tgatgccacagttgtttagaatgaaccgtaagccaa

SEQ ID NO: 7538 - DNA, 38 bp, Artificial Sequence
  Synthetic oligonucleotide
tgcaacggaccactgtgatgcaacctgaactttgttga

SEQ ID NO: 7539 - DNA, 36 bp, Artificial Sequence
  Synthetic oligonucleotide
accaccgacgcgagttgttggagagtatgatagcga

SEQ ID NO: 7540 - DNA, 37 bp, Artificial Sequence
  Synthetic oligonucleotide
actgaccccgaaatttacctcgtgaggctgcaacgga

SEQ ID NO: 7541 - DNA, 35 bp, Artificial Sequence
  Synthetic oligonucleotide
actgaccccgtgaattgcgtttgcctagctgaaag

SEQ ID NO: 7542 - DNA, 35 bp, Artificial Sequence
  Synthetic oligonucleotide
agacctgcctagctccatgtgtagtgcacccattt

SEQ ID NO: 7543 - DNA, 36 bp, Artificial Sequence
  Synthetic oligonucleotide
ataccaccaggccaacacgtctcagtgcctagaata

SEQ ID NO: 7544 - DNA, 38 bp, Artificial Sequence
  Synthetic oligonucleotide
atcaccgcagagagttctttgagcggtggaatgaatga

SEQ ID NO: 7545 - DNA, 38 bp, Artificial Sequence
  Synthetic oligonucleotide
atgaccggccgagctacgcaaaaggtgcctaaggttga

SEQ ID NO: 7546 - DNA, 36 bp, Artificial Sequence
  Synthetic oligonucleotide
atgcaccagtcccaacgtgattgagtttgtctgcta

SEQ ID NO: 7547 - DNA, 38 bp, Artificial Sequence
  Synthetic oligonucleotide
gaactgtgccgatcaggagtgaaatctgcagtaggtga

SEQ ID NO: 7548 - DNA, 35 bp, Artificial Sequence
  Synthetic oligonucleotide
gacgcgacaatcatccaggctgcaatcatgtattc

SEQ ID NO: 7549 - DNA, 37 bp, Artificial Sequence
  Synthetic oligonucleotide
gatgcgcaccagagcatgtactgaggatttgtaagga

SEQ ID NO: 7550 - DNA, 37 bp, Artificial Sequence
  Synthetic oligonucleotide
gccaacccaacacaccttagacgcggaagccagttga

SEQ ID NO: 7551 - DNA, 35 bp, Artificial Sequence
  Synthetic oligonucleotide
gccagactgcggctcataactacccaggtgtaaat

SEQ ID NO: 7552 - DNA, 37 bp, Artificial Sequence
  Synthetic oligonucleotide
gccgcctcctctacgcacacccgcagtcccctatgga

SEQ ID NO: 7553 - DNA, 35 bp, Artificial Sequence
  Synthetic oligonucleotide
tagagtgggtggcgtggaagcgtgggttacagttc

SEQ ID NO: 7554 - DNA, 37 bp, Artificial Sequence
  Synthetic oligonucleotide
tcctcaaccccagtagagcacaccactgtcatgtaga

SEQ ID NO: 7555 - DNA, 35 bp, Artificial Sequence
  Synthetic oligonucleotide
aacaccgggtgttatcgccgtcacacgccattcct

SEQ ID NO: 7556 - DNA, 37 bp, Artificial Sequence
  Synthetic oligonucleotide
acacccacacgtcagctgtacaaatcgccgctctcga

SEQ ID NO: 7557 - DNA, 36 bp, Artificial Sequence
  Synthetic oligonucleotide
acacgcggtgaaccaggacgtgtgactagccgatca

SEQ ID NO: 7558 - DNA, 38 bp, Artificial Sequence
  Synthetic oligonucleotide
accacaacccgaggtcgtcctcgctatgacgacagtga

SEQ ID NO: 7559 - DNA, 38 bp, Artificial Sequence
  Synthetic oligonucleotide
acccacggtcatgcatgggcaaacgtcccagtaactga

SEQ ID NO: 7560 - DNA, 37 bp, Artificial Sequence
  Synthetic oligonucleotide
gacaagggtcacgtgcgatagtggtccgtcgccaaga

SEQ ID NO: 7561 - DNA, 36 bp, Artificial Sequence
  Synthetic oligonucleotide
gacccggtgaccaccagggcctaaggagttcaggca

SEQ ID NO: 7562 - DNA, 36 bp, Artificial Sequence
  Synthetic oligonucleotide
gagacgaccaccattggtaactgtgcaccactgtaa

SEQ ID NO: 7563 - DNA, 37 bp, Artificial Sequence
  Synthetic oligonucleotide
gcacaccacaggctgagtgacaacattggaacggaga

SEQ ID NO: 7564 - DNA, 38 bp, Artificial Sequence
  Synthetic oligonucleotide
gccacgtaggccagatgttataaacagaacgtgcatga

SEQ ID NO: 7565 - DNA, 38 bp, Artificial Sequence
  Synthetic oligonucleotide
gccaggtacggagctaccgtaagtaaacagtacgctga

SEQ ID NO: 7566 - DNA, 35 bp, Artificial Sequence
  Synthetic oligonucleotide
tcacgcgaagtgaatgtgatacgctacttggttga

SEQ ID NO: 7567 - DNA, 38 bp, Artificial Sequence
  Synthetic oligonucleotide
tgtgccgatcgcccgatcagaacttcatcgcgtaatga

SEQ ID NO: 7568 - DNA, 38 bp, Artificial Sequence
  Synthetic oligonucleotide
aacacaacagacgcacttccgcacgcggattagtttga

SEQ ID NO: 7569 - DNA, 36 bp, Artificial Sequence
  Synthetic oligonucleotide
aacaggacggctcaatatatcgcgcagttcggtcaa

SEQ ID NO: 7570 - DNA, 35 bp, Artificial Sequence
  Synthetic oligonucleotide
aacccaaccccgactccttcgaccccgtccagttc

SEQ ID NO: 7571 - DNA, 38 bp, Artificial Sequence
  Synthetic oligonucleotide
acacacgcaaatatgatgagaccgcacgcttcacctga

SEQ ID NO: 7572 - DNA, 38 bp, Artificial Sequence
  Synthetic oligonucleotide
acactcacagtccatgtgtcgacatcgatcggccttga

SEQ ID NO: 7573 - DNA, 36 bp, Artificial Sequence
  Synthetic oligonucleotide
accacgaacgcatctttaaactgaccccgactccaa

SEQ ID NO: 7574 - DNA, 37 bp, Artificial Sequence
  Synthetic oligonucleotide
actgcctggtcgcaatgtagggtggtcgcacgctgga

SEQ ID NO: 7575 - DNA, 37 bp, Artificial Sequence
  Synthetic oligonucleotide
agcttagtgaccgcttccgcacccaatgcaaatgcga

SEQ ID NO: 7576 - DNA, 35 bp, Artificial Sequence
  Synthetic oligonucleotide
gacgacgcacatcgctgacagaggacaccatattt

SEQ ID NO: 7577 - DNA, 37 bp, Artificial Sequence
  Synthetic oligonucleotide
gatgagtcccatccgtacagagcgtcagtccccccga

SEQ ID NO: 7578 - DNA, 36 bp, Artificial Sequence
  Synthetic oligonucleotide
gatgcaaccgccacctatgctgctctgtgaatttaa

SEQ ID NO: 7579 - DNA, 36 bp, Artificial Sequence
  Synthetic oligonucleotide
gcaaacctgtgctgcctagcatacatcctactacaa

SEQ ID NO: 7580 - DNA, 35 bp, Artificial Sequence
  Synthetic oligonucleotide
gtgctcgcccccatataccacatcgcgcattactg

SEQ ID NO: 7581 - DNA, 35 bp, Artificial Sequence
  Synthetic oligonucleotide
tcacaccgtaacgcgtgcgcatctcctaccggacc

SEQ ID NO: 7582 - DNA, 37 bp, Artificial Sequence
  Synthetic oligonucleotide
tctgacgccgagggtacctcagagagtacttgaccga

SEQ ID NO: 7583 - DNA, 35 bp, Artificial Sequence
  Synthetic oligonucleotide
tgacgccgaacaaggtgagaaatcacgagacgaac

SEQ ID NO: 7584 - DNA, 37 bp, Artificial Sequence
  Synthetic oligonucleotide
acacgaacggacgcaattcacggggccaacaggtcga

SEQ ID NO: 7585 - DNA, 36 bp, Artificial Sequence
  Synthetic oligonucleotide
acatcacccggggtaggattaagtacgaagacgaca

SEQ ID NO: 7586 - DNA, 38 bp, Artificial Sequence
  Synthetic oligonucleotide
actcaggccggcaacaacatccaaacgatagggtgtga

SEQ ID NO: 7587 - DNA, 35 bp, Artificial Sequence
  Synthetic oligonucleotide
cgcgcatagttagtgtcaaacgtgcggatacactg

SEQ ID NO: 7588 - DNA, 35 bp, Artificial Sequence
  Synthetic oligonucleotide
gaagcacctggtcgtgtcatggcttgaatttttac

SEQ ID NO: 7589 - DNA, 38 bp, Artificial Sequence
  Synthetic oligonucleotide
gacgcctgaccgtcaaggcgctaggacactaactttga

SEQ ID NO: 7590 - DNA, 38 bp, Artificial Sequence
  Synthetic oligonucleotide
gacgcgaaaatgaaaggatgcacatagtacagggatga

SEQ ID NO: 7591 - DNA, 37 bp, Artificial Sequence
  Synthetic oligonucleotide
gatgcgtgtcaatggcgcgaggactttccgtgaggga

SEQ ID NO: 7592 - DNA, 37 bp, Artificial Sequence
  Synthetic oligonucleotide
gtcacacagcagctcagacccccagacattctgtcaa

SEQ ID NO: 7593 - DNA, 37 bp, Artificial Sequence
  Synthetic oligonucleotide
gtcgcgaacggagagtcacttcagtccttgtgtggga

SEQ ID NO: 7594 - DNA, 35 bp, Artificial Sequence
  Synthetic oligonucleotide
gtgcgggagtccctgaaacggtcacgtgatgctac

SEQ ID NO: 7595 - DNA, 37 bp, Artificial Sequence
  Synthetic oligonucleotide
tacgcacctgccaagtgacgcccgaatgttctgacga

SEQ ID NO: 7596 - DNA, 36 bp, Artificial Sequence
  Synthetic oligonucleotide
tcaccgcacatttggagacgttgcgcacccgattga

SEQ ID NO: 7597 - DNA, 37 bp, Artificial Sequence
  Synthetic oligonucleotide
tgagccaggaacacgctacatatgcaccaccggcgga

SEQ ID NO: 7598 - DNA, 36 bp, Artificial Sequence
  Synthetic oligonucleotide
tgtccaaccagtagaggggtatcggctcgaatgcta

SEQ ID NO: 7599 - DNA, 35 bp, Artificial Sequence
  Synthetic oligonucleotide
aaccacgcagtccgactcttgtgccattgattgtt

SEQ ID NO: 7600 - DNA, 36 bp, Artificial Sequence
  Synthetic oligonucleotide
acagaccgcccacctcgtcacacccagagcgttgca

SEQ ID NO: 7601 - DNA, 35 bp, Artificial Sequence
  Synthetic oligonucleotide
cccggccgtgcacgtcaactgccgctgttattttg

SEQ ID NO: 7602 - DNA, 37 bp, Artificial Sequence
  Synthetic oligonucleotide
gaacacaacccgccatacccaacgtcgcctcagacga

SEQ ID NO: 7603 - DNA, 37 bp, Artificial Sequence
  Synthetic oligonucleotide
gacaatgcaagcctaggacttcgtcggatgacgacga

SEQ ID NO: 7604 - DNA, 36 bp, Artificial Sequence
  Synthetic oligonucleotide
gacacccgaacgctgattacgtgacgtcacttatga

SEQ ID NO: 7605 - DNA, 38 bp, Artificial Sequence
  Synthetic oligonucleotide
gaccgacgcgagaaatatgcatcgtagggacggtatga

SEQ ID NO: 7606 - DNA, 35 bp, Artificial Sequence
  Synthetic oligonucleotide
gacgtggcttcgtgaagatcaggtttcgtatttct

SEQ ID NO: 7607 - DNA, 35 bp, Artificial Sequence
  Synthetic oligonucleotide
gactgagcggacaataacggataaaatgccggagc

SEQ ID NO: 7608 - DNA, 38 bp, Artificial Sequence
  Synthetic oligonucleotide
gcacatgtccaggcggagggattgcaactggttggtga

SEQ ID NO: 7609 - DNA, 37 bp, Artificial Sequence
  Synthetic oligonucleotide
gccaacgtgcctttagactccgctggtactatcacga

SEQ ID NO: 7610 - DNA, 36 bp, Artificial Sequence
  Synthetic oligonucleotide
gcgaagccgaccgtgcattacggacatataagacga

SEQ ID NO: 7611 - DNA, 36 bp, Artificial Sequence
  Synthetic oligonucleotide
gcgaccatacgcgcaaggtatagtcgtcatactcaa

SEQ ID NO: 7612 - DNA, 35 bp, Artificial Sequence
  Synthetic oligonucleotide
ggaccccagtgccgttacgtgacaggcattgacca

SEQ ID NO: 7613 - DNA, 35 bp, Artificial Sequence
  Synthetic oligonucleotide
gtcaagtcaggtgacggatttgacctacgcgagag

SEQ ID NO: 7614 - DNA, 36 bp, Artificial Sequence
  Synthetic oligonucleotide
tcaagcggagcgagtccaacgaaattagttaagtaa

SEQ ID NO: 7615 - DNA, 38 bp, Artificial Sequence
  Synthetic oligonucleotide
acaacacaccggagtggagttcgacagtatcataatga

SEQ ID NO: 7616 - DNA, 35 bp, Artificial Sequence
  Synthetic oligonucleotide
acagtccagatgcgggtgttatgttggagttgaac

SEQ ID NO: 7617 - DNA, 38 bp, Artificial Sequence
  Synthetic oligonucleotide
acatgggccgcaacgaaagtatagttgtataagtgtga

SEQ ID NO: 7618 - DNA, 37 bp, Artificial Sequence
  Synthetic oligonucleotide
accaccgcagggggtgatattgtgggcaaaacgagga

SEQ ID NO: 7619 - DNA, 37 bp, Artificial Sequence
  Synthetic oligonucleotide
accgactcgacacaacgttcaagtacatcttaatgga

SEQ ID NO: 7620 - DNA, 35 bp, Artificial Sequence
  Synthetic oligonucleotide
agcaaccacccgcaactgacgagactctcttaaat

SEQ ID NO: 7621 - DNA, 35 bp, Artificial Sequence
  Synthetic oligonucleotide
atgccccagccgacgtctcagtcactccacggaag

SEQ ID NO: 7622 - DNA, 38 bp, Artificial Sequence
  Synthetic oligonucleotide
gacaccaacgcgtgcggtaccacagacatctctcgtga

SEQ ID NO: 7623 - DNA, 36 bp, Artificial Sequence
  Synthetic oligonucleotide
gatgtgcagggggcgtgaaaactgaaatcgcgaaaa

SEQ ID NO: 7624 - DNA, 36 bp, Artificial Sequence
  Synthetic oligonucleotide
gcaacgccactctacatcggtaatttttgctgaata

SEQ ID NO: 7625 - DNA, 35 bp, Artificial Sequence
  Synthetic oligonucleotide
gccggaaccgtcaccgatgttatgtggcgcgctgt

SEQ ID NO: 7626 - DNA, 35 bp, Artificial Sequence
  Synthetic oligonucleotide
gttgccgcagagggaactatgtatctgcgtctgct

SEQ ID NO: 7627 - DNA, 38 bp, Artificial Sequence
  Synthetic oligonucleotide
tacatgcgcagagaaaggaaagttcacgtcgatagtga

SEQ ID NO: 7628 - DNA, 35 bp, Artificial Sequence
  Synthetic oligonucleotide
tcaccgtgcgaactgtccatgatcaacgctttccg

SEQ ID NO: 7629 - DNA, 38 bp, Artificial Sequence
  Synthetic oligonucleotide
tcacgtaccagacgtagaaatatcattatgacaggtga

SEQ ID NO: 7630 - DNA, 35 bp, Artificial Sequence
  Synthetic oligonucleotide
tccaacgcccaggagtgccgctgactgcacaccgg

SEQ ID NO: 7631 - DNA, 37 bp, Artificial Sequence
  Synthetic oligonucleotide
tgacacagcgggatcgccgacaggatctcatttgcga

SEQ ID NO: 7632 - DNA, 36 bp, Artificial Sequence
  Synthetic oligonucleotide
tgagcaccgcaggggctgatatgtcggcattgtgga

SEQ ID NO: 7633 - DNA, 35 bp, Artificial Sequence
  Synthetic oligonucleotide
tgagggaccagggttggtccgaaacgactgcaggt

SEQ ID NO: 7634 - DNA, 35 bp, Artificial Sequence
  Synthetic oligonucleotide
tgcacatcagcttcccctccatctcacctcactta

SEQ ID NO: 7635 - DNA, 35 bp, Artificial Sequence
  Synthetic oligonucleotide
acacaccggaagcaccaattgacactaacgtgcca

SEQ ID NO: 7636 - DNA, 36 bp, Artificial Sequence
  Synthetic oligonucleotide
acgacacacggcgttccagttagttgaccgtcatca

SEQ ID NO: 7637 - DNA, 36 bp, Artificial Sequence
  Synthetic oligonucleotide
atgagccaacagtcggccgagtctaggacccacgta

SEQ ID NO: 7638 - DNA, 35 bp, Artificial Sequence
  Synthetic oligonucleotide
atgccccagcataagcaccaatcgtcacacttctc

SEQ ID NO: 7639 - DNA, 38 bp, Artificial Sequence
  Synthetic oligonucleotide
atgctgccagtggacacaaagtaggtaggactgtgtga

SEQ ID NO: 7640 - DNA, 36 bp, Artificial Sequence
  Synthetic oligonucleotide
caccaggagaggcgccgggcgtcgttttgctaagta

SEQ ID NO: 7641 - DNA, 35 bp, Artificial Sequence
  Synthetic oligonucleotide
gactgcaaccactcgatcgaactgacactaagaca

SEQ ID NO: 7642 - DNA, 38 bp, Artificial Sequence
  Synthetic oligonucleotide
gagtgcggctaaccatgatttgatccggacattgctga

SEQ ID NO: 7643 - DNA, 37 bp, Artificial Sequence
  Synthetic oligonucleotide
gatgcacgggaagtggactacgcacgagcttcaacga

SEQ ID NO: 7644 - DNA, 36 bp, Artificial Sequence
  Synthetic oligonucleotide
gccgaagcaacaggctccacacacactacacattca

SEQ ID NO: 7645 - DNA, 35 bp, Artificial Sequence
  Synthetic oligonucleotide
gtcatgcaccgcgttcattatagaggagggaggtc

SEQ ID NO: 7646 - DNA, 35 bp, Artificial Sequence
  Synthetic oligonucleotide
gtcgcatgcaagtcccgaacagcagaccgcaattc

SEQ ID NO: 7647 - DNA, 36 bp, Artificial Sequence
  Synthetic oligonucleotide
tcaagccacaacagcatgatctatgcgaatacctaa

SEQ ID NO: 7648 - DNA, 35 bp, Artificial Sequence
  Synthetic oligonucleotide
tcaccaccagataggttgtcgattggacgactttt

SEQ ID NO: 7649 - DNA, 38 bp, Artificial Sequence
  Synthetic oligonucleotide
tcgacacagggaagacgaggatttggtggttgaactga

SEQ ID NO: 7650 - DNA, 35 bp, Artificial Sequence
  Synthetic oligonucleotide
aactcccccaaggtcagtgcgtcctttcaacgtaa

SEQ ID NO: 7651 - DNA, 36 bp, Artificial Sequence
  Synthetic oligonucleotide
acacaccacccattacattccgttgtcagggagaca

SEQ ID NO: 7652 - DNA, 37 bp, Artificial Sequence
  Synthetic oligonucleotide
acaccagcaagccaatacgtgctaaaagtcaggttga

SEQ ID NO: 7653 - DNA, 35 bp, Artificial Sequence
  Synthetic oligonucleotide
acaccgacaggagggtatctcgagaatcaacggtg

SEQ ID NO: 7654 - DNA, 37 bp, Artificial Sequence
  Synthetic oligonucleotide
accaacaccagggtaaaggaccaagtccggaggacga

SEQ ID NO: 7655 - DNA, 35 bp, Artificial Sequence
  Synthetic oligonucleotide
atgccgtgcaatatcgagtaagcagttcaagatcg

SEQ ID NO: 7656 - DNA, 37 bp, Artificial Sequence
  Synthetic oligonucleotide
gacacgtacacaatgtgtgaaggacatcgagggtgga

SEQ ID NO: 7657 - DNA, 38 bp, Artificial Sequence
  Synthetic oligonucleotide
gcaagtccaactgaccccgctaaccttacccccaatga

SEQ ID NO: 7658 - DNA, 36 bp, Artificial Sequence
  Synthetic oligonucleotide
gcacaacccgagtctcagaggagcactgtcaacgaa

SEQ ID NO: 7659 - DNA, 38 bp, Artificial Sequence
  Synthetic oligonucleotide
gccggagtaagaggcattagtagtcagtttgtgcctga

SEQ ID NO: 7660 - DNA, 35 bp, Artificial Sequence
  Synthetic oligonucleotide
gtacgtgcgccaccgatgtgttgtaaggagtctgg

SEQ ID NO: 7661 - DNA, 37 bp, Artificial Sequence
  Synthetic oligonucleotide
ttaccgacgcccatgagatttgtgttcctgtatgtga

SEQ ID NO: 7662 - DNA, 36 bp, Artificial Sequence
  Synthetic oligonucleotide
ttgcacgcaggcatataataaaaaagggcgattcaa

SEQ ID NO: 7663 - DNA, 38 bp, Artificial Sequence
  Synthetic oligonucleotide
aaccaggagacggggtgtacaaggcggaaagctactga

SEQ ID NO: 7664 - DNA, 35 bp, Artificial Sequence
  Synthetic oligonucleotide
acacctcaagagtgcccacgacctcctaccaaatt

SEQ ID NO: 7665 - DNA, 35 bp, Artificial Sequence
  Synthetic oligonucleotide
acccaacggcaaaccacgttaatgaataccgtatc

SEQ ID NO: 7666 - DNA, 36 bp, Artificial Sequence
  Synthetic oligonucleotide
agaggcggtcagtctctcaacatggcagtcacgtaa

SEQ ID NO: 7667 - DNA, 38 bp, Artificial Sequence
  Synthetic oligonucleotide
gacacaccatctgccgtgcattaaatcccacagagtga

SEQ ID NO: 7668 - DNA, 34 bp, Artificial Sequence
  Synthetic oligonucleotide
gaccaccggaggcacgctgctgtctcgaatcccc

SEQ ID NO: 7669 - DNA, 35 bp, Artificial Sequence
  Synthetic oligonucleotide
gaccacgcgacagagcttaaataaaacgcactagg

SEQ ID NO: 7670 - DNA, 36 bp, Artificial Sequence
  Synthetic oligonucleotide
gactacaggcacggggtaatgcgctacggttcgata

SEQ ID NO: 7671 - DNA, 38 bp, Artificial Sequence
  Synthetic oligonucleotide
gcccagtgtcggagtctaaaatagctgagtaatggtga

SEQ ID NO: 7672 - DNA, 37 bp, Artificial Sequence
  Synthetic oligonucleotide
gccgacatagtggtgcgttaaacggacaatgcctcga

SEQ ID NO: 7673 - DNA, 38 bp, Artificial Sequence
  Synthetic oligonucleotide
gcgaagcacccgtacgagatggttcgcgtgtgacctga

SEQ ID NO: 7674 - DNA, 35 bp, Artificial Sequence
  Synthetic oligonucleotide
gtcaaacgcaggtctccggtcggagctagcatagg

SEQ ID NO: 7675 - DNA, 36 bp, Artificial Sequence
  Synthetic oligonucleotide
gtgcatcaggagcataacgatttataacggtagtca

SEQ ID NO: 7676 - DNA, 38 bp, Artificial Sequence
  Synthetic oligonucleotide
tacgacgcccagttagatcggataatagtccgtggtga

SEQ ID NO: 7677 - DNA, 38 bp, Artificial Sequence
  Synthetic oligonucleotide
tcacgcatcatggctgccagtcgctcctcatgagatga

SEQ ID NO: 7678 - DNA, 38 bp, Artificial Sequence
  Synthetic oligonucleotide
tgacacgacgttcctgtgagaaagaggaggctgattga

SEQ ID NO: 7679 - DNA, 37 bp, Artificial Sequence
  Synthetic oligonucleotide
acacagcgaaggcaagacgactatgtgttcacggtga

SEQ ID NO: 7680 - DNA, 35 bp, Artificial Sequence
  Synthetic oligonucleotide
gacaccagtcgcgtagttcggtgaaacagtactct

SEQ ID NO: 7681 - DNA, 37 bp, Artificial Sequence
  Synthetic oligonucleotide
gacgcagtcggcatccctctttaattccttgtcctga

SEQ ID NO: 7682 - DNA, 36 bp, Artificial Sequence
  Synthetic oligonucleotide
gacgtgcgaccaagtacgatgtaagtcttgctgtaa

SEQ ID NO: 7683 - DNA, 38 bp, Artificial Sequence
  Synthetic oligonucleotide
gatcaaggccagaggtatggactgatgaatgttgctga

SEQ ID NO: 7684 - DNA, 38 bp, Artificial Sequence
  Synthetic oligonucleotide
gatgcacgagtcagagcgggcgtaacaacgtcaatcga

SEQ ID NO: 7685 - DNA, 36 bp, Artificial Sequence
  Synthetic oligonucleotide
gcatgcgaacgtcgtcgagagtgtccggttccaata

SEQ ID NO: 7686 - DNA, 36 bp, Artificial Sequence
  Synthetic oligonucleotide
gtggtccgccgttcatacaaatctattctatagaca

SEQ ID NO: 7687 - DNA, 35 bp, Artificial Sequence
  Synthetic oligonucleotide
tccgaggcgggtaggacgtccctatcaatcagatg

SEQ ID NO: 7688 - DNA, 37 bp, Artificial Sequence
  Synthetic oligonucleotide
tgacgcgccaccagatcagcattaccttcgtaaggga

SEQ ID NO: 7689 - DNA, 36 bp, Artificial Sequence
  Synthetic oligonucleotide
tgatgcatgcgcgagtggtgagtgactgcgaaaaga

SEQ ID NO: 7690 - DNA, 35 bp, Artificial Sequence
  Synthetic oligonucleotide
ttgacacgccaaaactcgaacaaacgaattgcagg

SEQ ID NO: 7691 - DNA, 36 bp, Artificial Sequence
  Synthetic oligonucleotide
acacacccgcgaaaagcaagtacgggccagagggaa

SEQ ID NO: 7692 - DNA, 36 bp, Artificial Sequence
  Synthetic oligonucleotide
agccaagcccggtgaatgcactgggatgcaactcaa

SEQ ID NO: 7693 - DNA, 37 bp, Artificial Sequence
  Synthetic oligonucleotide
gaacacaacgtgcgagggcatcgattcctacgaaaga

SEQ ID NO: 7694 - DNA, 38 bp, Artificial Sequence
  Synthetic oligonucleotide
gacaccgcaccagtatgtatactgtcgccatcgtttga

SEQ ID NO: 7695 - DNA, 35 bp, Artificial Sequence
  Synthetic oligonucleotide
gacgaccatcatgtgtgcaacaactgcagatcacg

SEQ ID NO: 7696 - DNA, 35 bp, Artificial Sequence
  Synthetic oligonucleotide
gacgtagggcatgatacaccttcacgctactttcg

SEQ ID NO: 7697 - DNA, 37 bp, Artificial Sequence
  Synthetic oligonucleotide
gcacgtggcagtaagcaggttcaatgcagttctccga

SEQ ID NO: 7698 - DNA, 36 bp, Artificial Sequence
  Synthetic oligonucleotide
gcccacaaacagggtattaagtaatgtactgataca

SEQ ID NO: 7699 - DNA, 36 bp, Artificial Sequence
  Synthetic oligonucleotide
gctaaccacattttaaccgacccaccgcacatccga

SEQ ID NO: 7700 - DNA, 36 bp, Artificial Sequence
  Synthetic oligonucleotide
gtgaccgtccatggatcttacgcaggtttgggctaa

SEQ ID NO: 7701 - DNA, 35 bp, Artificial Sequence
  Synthetic oligonucleotide
tagacgccacccatttaactcgtgcagactttatg

SEQ ID NO: 7702 - DNA, 37 bp, Artificial Sequence
  Synthetic oligonucleotide
tcaacgcctgtgggtgtacgagccaccattcgcgcga

SEQ ID NO: 7703 - DNA, 37 bp, Artificial Sequence
  Synthetic oligonucleotide
tgactgctggggaactggatacagacaggttgagtga

SEQ ID NO: 7704 - DNA, 37 bp, Artificial Sequence
  Synthetic oligonucleotide
tgagatccggcgcacgagacgatgggatctacactaa

SEQ ID NO: 7705 - DNA, 37 bp, Artificial Sequence
  Synthetic oligonucleotide
ttgaagcgcagggaacgggaatctgtaaaggcccaga

SEQ ID NO: 7706 - DNA, 38 bp, Artificial Sequence
  Synthetic oligonucleotide
aacacgcgcaccccgaccagccaagggagagactatga

SEQ ID NO: 7707 - DNA, 37 bp, Artificial Sequence
  Synthetic oligonucleotide
aacgaccggtaacgatctcgttatgggactatggcga

SEQ ID NO: 7708 - DNA, 35 bp, Artificial Sequence
  Synthetic oligonucleotide
acatgcccagtgggtattgctctaaattgtgacca

SEQ ID NO: 7709 - DNA, 37 bp, Artificial Sequence
  Synthetic oligonucleotide
acccacccctagccccacgactcgatccacctgtcga

SEQ ID NO: 7710 - DNA, 36 bp, Artificial Sequence
  Synthetic oligonucleotide
acgtggacgcaggtgttagcccccgccacagattta

SEQ ID NO: 7711 - DNA, 35 bp, Artificial Sequence
  Synthetic oligonucleotide
actcgccggccgttaaggagtcctcatatgggacg

SEQ ID NO: 7712 - DNA, 34 bp, Artificial Sequence
  Synthetic oligonucleotide
atgtgcatcagtcactccgctaccgtcctacaac

SEQ ID NO: 7713 - DNA, 35 bp, Artificial Sequence
  Synthetic oligonucleotide
gacaacgtgagtgttgcatccctaaagtcacaaga

SEQ ID NO: 7714 - DNA, 37 bp, Artificial Sequence
  Synthetic oligonucleotide
gacattgcggaacgcctaagagaaattgtggcaacga

SEQ ID NO: 7715 - DNA, 35 bp, Artificial Sequence
  Synthetic oligonucleotide
gagtcgacgcggaattagacatactagacgaaaag

SEQ ID NO: 7716 - DNA, 38 bp, Artificial Sequence
  Synthetic oligonucleotide
gcaacatccaccccgttataaagtgacgtctccattga

SEQ ID NO: 7717 - DNA, 37 bp, Artificial Sequence
  Synthetic oligonucleotide
gcacaactacggatgagtcgtcgcagtcagcatggga

SEQ ID NO: 7718 - DNA, 37 bp, Artificial Sequence
  Synthetic oligonucleotide
gcacaagaacaggatgctgccaatgtcgtccgacgga

SEQ ID NO: 7719 - DNA, 35 bp, Artificial Sequence
  Synthetic oligonucleotide
gcacacgcgaacggatagcacatccacgacatcac

SEQ ID NO: 7720 - DNA, 38 bp, Artificial Sequence
  Synthetic oligonucleotide
gcacaggacaatgctaactcgccacgctgtttcagtga

SEQ ID NO: 7721 - DNA, 36 bp, Artificial Sequence
  Synthetic oligonucleotide
gccacccacctgctcacacgatctgttcctctacga

SEQ ID NO: 7722 - DNA, 36 bp, Artificial Sequence
  Synthetic oligonucleotide
gccatcgtgctgcctaccgaagttccgactcttgaa

SEQ ID NO: 7723 - DNA, 35 bp, Artificial Sequence
  Synthetic oligonucleotide
gcccgccccaccctttccgtatgtcccaacatcga

SEQ ID NO: 7724 - DNA, 36 bp, Artificial Sequence
  Synthetic oligonucleotide
gctgcagacagctgtaccttacaccaaacttccgaa

SEQ ID NO: 7725 - DNA, 35 bp, Artificial Sequence
  Synthetic oligonucleotide
tacttaccccgaaacctgccggaccccgtccactg

SEQ ID NO: 7726 - DNA, 35 bp, Artificial Sequence
  Synthetic oligonucleotide
tcaaccaaccccgcccgatacaatgcaaagcgcgt

SEQ ID NO: 7727 - DNA, 36 bp, Artificial Sequence
  Synthetic oligonucleotide
tcaatcgcggggggatcgtgcaggatgtaaacatta

SEQ ID NO: 7728 - DNA, 35 bp, Artificial Sequence
  Synthetic oligonucleotide
tgcgaaccgaagatccacgtacttcagacctcagt

SEQ ID NO: 7729 - DNA, 35 bp, Artificial Sequence
  Synthetic oligonucleotide
aacaccaacgtaccaaacgcctagagtgtctacta

SEQ ID NO: 7730 - DNA, 34 bp, Artificial Sequence
  Synthetic oligonucleotide
aacccaagtgctgtaggaatgtcccagttagtac

SEQ ID NO: 7731 - DNA, 37 bp, Artificial Sequence
  Synthetic oligonucleotide
acacacgccacgacagtagatggacgccacgctagga

SEQ ID NO: 7732 - DNA, 36 bp, Artificial Sequence
  Synthetic oligonucleotide
actgcgggcggtgttcgagagctgtacttacaataa

SEQ ID NO: 7733 - DNA, 35 bp, Artificial Sequence
  Synthetic oligonucleotide
atcgcaccgcaaaggcaacgatcaggtcagtcatc

SEQ ID NO: 7734 - DNA, 35 bp, Artificial Sequence
  Synthetic oligonucleotide
gaccgacccgcacatgaagagaaaggccctctatg

SEQ ID NO: 7735 - DNA, 36 bp, Artificial Sequence
  Synthetic oligonucleotide
gactgaggagcatatgtccagttaagtctgcaaaga

SEQ ID NO: 7736 - DNA, 35 bp, Artificial Sequence
  Synthetic oligonucleotide
gcgccatgtcgccacgactaggttcactttccctc

SEQ ID NO: 7737 - DNA, 37 bp, Artificial Sequence
  Synthetic oligonucleotide
gctgcccatgcagtacagaattccgccgaaataacga

SEQ ID NO: 7738 - DNA, 35 bp, Artificial Sequence
  Synthetic oligonucleotide
ggacccgaaagggtgcacgagtctaacgttcggaa

SEQ ID NO: 7739 - DNA, 35 bp, Artificial Sequence
  Synthetic oligonucleotide
gtgacacgcacaggtaagtttagtgatgagaagag

SEQ ID NO: 7740 - DNA, 36 bp, Artificial Sequence
  Synthetic oligonucleotide
tacggaccggcactccacgaaaatcatccacccaca

SEQ ID NO: 7741 - DNA, 35 bp, Artificial Sequence
  Synthetic oligonucleotide
tcatccccaaacgcagacatggacaaacagttatt

SEQ ID NO: 7742 - DNA, 35 bp, Artificial Sequence
  Synthetic oligonucleotide
tctagcgccgctacatctactgaccccgaccaagg

SEQ ID NO: 7743 - DNA, 38 bp, Artificial Sequence
  Synthetic oligonucleotide
tgcgaacatcgcgcgaggtatgactgaacgtgctctga

SEQ ID NO: 7744 - DNA, 36 bp, Artificial Sequence
  Synthetic oligonucleotide
agacacgcagaccatgtcactcaattctggtattga

SEQ ID NO: 7745 - DNA, 36 bp, Artificial Sequence
  Synthetic oligonucleotide
aggtgccccaggacctatcctacgatcccaatcgga

SEQ ID NO: 7746 - DNA, 38 bp, Artificial Sequence
  Synthetic oligonucleotide
atacgccgcagttctccattcgtatgtgtgagtcctga

SEQ ID NO: 7747 - DNA, 35 bp, Artificial Sequence
  Synthetic oligonucleotide
atgacagccacacctaacgaccgccccgagaccct

SEQ ID NO: 7748 - DNA, 35 bp, Artificial Sequence
  Synthetic oligonucleotide
gaaccgccgaaacgtacatttacgcatttttctat

SEQ ID NO: 7749 - DNA, 38 bp, Artificial Sequence
  Synthetic oligonucleotide
gacccgcgatcggagaaaaggggtcagccaactgatga

SEQ ID NO: 7750 - DNA, 36 bp, Artificial Sequence
  Synthetic oligonucleotide
gactgcccgccttgtgaaccaccccatccttacaca

SEQ ID NO: 7751 - DNA, 38 bp, Artificial Sequence
  Synthetic oligonucleotide
gagcacgctggacgagggtcctcacatagtcgcactga

SEQ ID NO: 7752 - DNA, 35 bp, Artificial Sequence
  Synthetic oligonucleotide
gatgccgcaaagtgtggggcgtgagcagattggtt

SEQ ID NO: 7753 - DNA, 36 bp, Artificial Sequence
  Synthetic oligonucleotide
gccacaccaacttaatctgtcgtaagtcgagtgtaa

SEQ ID NO: 7754 - DNA, 35 bp, Artificial Sequence
  Synthetic oligonucleotide
gccaccctataagacgataagaccttaacactgta

SEQ ID NO: 7755 - DNA, 36 bp, Artificial Sequence
  Synthetic oligonucleotide
gccacggccggatatttcgtatgtcgaggcaataca

SEQ ID NO: 7756 - DNA, 36 bp, Artificial Sequence
  Synthetic oligonucleotide
gccacgtgcaagatgctctattcgtcccggtcaaga

SEQ ID NO: 7757 - DNA, 35 bp, Artificial Sequence
  Synthetic oligonucleotide
gctgagccagccatccttccctgattagtagacct

SEQ ID NO: 7758 - DNA, 35 bp, Artificial Sequence
  Synthetic oligonucleotide
tatgccgccgcaccgaatactagacgtttgtgagc

SEQ ID NO: 7759 - DNA, 36 bp, Artificial Sequence
  Synthetic oligonucleotide
tccacagggctgctaggctgttctgtgcctcaatta

SEQ ID NO: 7760 - DNA, 35 bp, Artificial Sequence
  Synthetic oligonucleotide
tcccacgacaggctgaatcttttgaccacgaatgt

SEQ ID NO: 7761 - DNA, 35 bp, Artificial Sequence
  Synthetic oligonucleotide
tgcactccaagcttccacattagggtgtacgcacc

SEQ ID NO: 7762 - DNA, 37 bp, Artificial Sequence
  Synthetic oligonucleotide
atgcaccgcctgtcatggcgaacctgaaacgtgacga

SEQ ID NO: 7763 - DNA, 35 bp, Artificial Sequence
  Synthetic oligonucleotide
caaggctgaagttggcaatatcaggctgtctggcg

SEQ ID NO: 7764 - DNA, 38 bp, Artificial Sequence
  Synthetic oligonucleotide
gacacggaggtcgtaaatcggtgggatcagtcggatga

SEQ ID NO: 7765 - DNA, 38 bp, Artificial Sequence
  Synthetic oligonucleotide
gacgcgctagctgacgtgaacacggcgcccttgcatga

SEQ ID NO: 7766 - DNA, 36 bp, Artificial Sequence
  Synthetic oligonucleotide
gagccagaaaggtggagaattgcaggtttatgagta

SEQ ID NO: 7767 - DNA, 35 bp, Artificial Sequence
  Synthetic oligonucleotide
gatgaagcaggtgagcaagagaacgttatgtcggt

SEQ ID NO: 7768 - DNA, 37 bp, Artificial Sequence
  Synthetic oligonucleotide
gcacacgagccggtgggacagaaggcctaagttcaga

SEQ ID NO: 7769 - DNA, 37 bp, Artificial Sequence
  Synthetic oligonucleotide
gtatgcgccgaatcctgcaagcatagttaataactga

SEQ ID NO: 7770 - DNA, 37 bp, Artificial Sequence
  Synthetic oligonucleotide
tcaaccggtgtcccccgccggtcggtaggctactcga

SEQ ID NO: 7771 - DNA, 36 bp, Artificial Sequence
  Synthetic oligonucleotide
tcacacaaacatccgtatgtgacaggtggtgcagga

SEQ ID NO: 7772 - DNA, 36 bp, Artificial Sequence
  Synthetic oligonucleotide
tgaatcgcagttcgtgtctatcccaccggctcggaa

SEQ ID NO: 7773 - DNA, 37 bp, Artificial Sequence
  Synthetic oligonucleotide
tgacgacgacaaaacaacataacgtcattacgtagga

SEQ ID NO: 7774 - DNA, 35 bp, Artificial Sequence
  Synthetic oligonucleotide
aacgacctcacatcacacctcaactcgagccacgt

SEQ ID NO: 7775 - DNA, 35 bp, Artificial Sequence
  Synthetic oligonucleotide
acacacgcagacccaggggcgcgaggaccagcttc

SEQ ID NO: 7776 - DNA, 37 bp, Artificial Sequence
  Synthetic oligonucleotide
acacacgcgcgtaactcctagagcccagccgccgtga

SEQ ID NO: 7777 - DNA, 38 bp, Artificial Sequence
  Synthetic oligonucleotide
acaccgcagtgcgccgcaatttcgttataagttggtga

SEQ ID NO: 7778 - DNA, 35 bp, Artificial Sequence
  Synthetic oligonucleotide
gcaagcagaccgccatagtccacatgcaggggaag

SEQ ID NO: 7779 - DNA, 33 bp, Artificial Sequence
  Synthetic oligonucleotide
gttgacagcacacatacgttagtcggagctcga

SEQ ID NO: 7780 - DNA, 35 bp, Artificial Sequence
  Synthetic oligonucleotide
tactgaccccgaaacctgccggaccccgtccacta

SEQ ID NO: 7781 - DNA, 38 bp, Artificial Sequence
  Synthetic oligonucleotide
tatcgcaacaggtccagtgtcatgcatatagtatctga

SEQ ID NO: 7782 - DNA, 35 bp, Artificial Sequence
  Synthetic oligonucleotide
tcacccaccagtcggccaacgttccactcgatttt

SEQ ID NO: 7783 - DNA, 38 bp, Artificial Sequence
  Synthetic oligonucleotide
tcacgcaccacccaaagtcgcacaaggtacactactga

SEQ ID NO: 7784 - DNA, 37 bp, Artificial Sequence
  Synthetic oligonucleotide
tgcggagcatacgggtgaacggtgcgccagtactgga

SEQ ID NO: 7785 - DNA, 38 bp, Artificial Sequence
  Synthetic oligonucleotide
tgtgcggacgaactgatcgcgctacgtgatatcaatga

SEQ ID NO: 7786 - DNA, 38 bp, Artificial Sequence
  Synthetic oligonucleotide
ttgccaggtctcagccgcttcccgtcgatcgtaggtga

SEQ ID NO: 7787 - DNA, 36 bp, Artificial Sequence
  Synthetic oligonucleotide
aacgcggagtatggtgcaatcgtactcagcctgata

SEQ ID NO: 7788 - DNA, 35 bp, Artificial Sequence
  Synthetic oligonucleotide
acaccaggggcaatcgttagctgttggtaatgcac

SEQ ID NO: 7789 - DNA, 35 bp, Artificial Sequence
  Synthetic oligonucleotide
acacgcatgcccaaaccatctttacccaggtactc

SEQ ID NO: 7790 - DNA, 37 bp, Artificial Sequence
  Synthetic oligonucleotide
accaccacgcgctatattgtgtcaggttagccgtaga

SEQ ID NO: 7791 - DNA, 36 bp, Artificial Sequence
  Synthetic oligonucleotide
accagcacgcaataggtttctgaacggtgacggtaa

SEQ ID NO: 7792 - DNA, 35 bp, Artificial Sequence
  Synthetic oligonucleotide
acccgaacaggtggtgcccattgctcggttctagc

SEQ ID NO: 7793 - DNA, 35 bp, Artificial Sequence
  Synthetic oligonucleotide
gaacacagccgcagtagtaccaggtcatgtcacca

SEQ ID NO: 7794 - DNA, 36 bp, Artificial Sequence
  Synthetic oligonucleotide
gacaacgccaagcggctttcttcttctccgttacca

SEQ ID NO: 7795 - DNA, 38 bp, Artificial Sequence
  Synthetic oligonucleotide
gacacgcgtaaggctaattcgcctagtcaaatcgttga

SEQ ID NO: 7796 - DNA, 37 bp, Artificial Sequence
  Synthetic oligonucleotide
gaccccgcgccgatgccagtggtcgatacggttggga

SEQ ID NO: 7797 - DNA, 35 bp, Artificial Sequence
  Synthetic oligonucleotide
gacgcagagttcactcgagacttatgcggatgatc

SEQ ID NO: 7798 - DNA, 35 bp, Artificial Sequence
  Synthetic oligonucleotide
gacgcccctgcgttgcggtccaggtccatcgcctc

SEQ ID NO: 7799 - DNA, 38 bp, Artificial Sequence
  Synthetic oligonucleotide
gacggtatgctgtccaagctcccgttgaaactggctga

SEQ ID NO: 7800 - DNA, 35 bp, Artificial Sequence
  Synthetic oligonucleotide
gagtcaccgaacgtcgttgcgaatgttacgtagag

SEQ ID NO: 7801 - DNA, 36 bp, Artificial Sequence
  Synthetic oligonucleotide
gctgatcgcccatgtacatgtcgaaagatctactta

SEQ ID NO: 7802 - DNA, 36 bp, Artificial Sequence
  Synthetic oligonucleotide
gttgacgtacggatccgaggcctagagagcacagca

SEQ ID NO: 7803 - DNA, 37 bp, Artificial Sequence
  Synthetic oligonucleotide
taccgcagtcgcaaactaccttgcatgtctcactcga

SEQ ID NO: 7804 - DNA, 38 bp, Artificial Sequence
  Synthetic oligonucleotide
tacgcacagtcgcctaacgttcattctcatcaacctga

SEQ ID NO: 7805 - DNA, 36 bp, Artificial Sequence
  Synthetic oligonucleotide
tgaccacaacgctgcggaacaagcgaacaattctta

SEQ ID NO: 7806 - DNA, 38 bp, Artificial Sequence
  Synthetic oligonucleotide
tgccgagatcgcacggtaaacgctacatcaagttttga

SEQ ID NO: 7807 - DNA, 36 bp, Artificial Sequence
  Synthetic oligonucleotide
tgcgcggagccgtgtgatcagtagccacatgcttca

SEQ ID NO: 7808 - DNA, 38 bp, Artificial Sequence
  Synthetic oligonucleotide
accgagacgccgttcaggtaatcgctagtaccttctga

SEQ ID NO: 7809 - DNA, 35 bp, Artificial Sequence
  Synthetic oligonucleotide
agtacaggcggtccagacgctccaatgtaactctc

SEQ ID NO: 7810 - DNA, 37 bp, Artificial Sequence
  Synthetic oligonucleotide
atcgagccgaccgaacagtagcaaggacgaaatttga

SEQ ID NO: 7811 - DNA, 37 bp, Artificial Sequence
  Synthetic oligonucleotide
gacgggtgggagccggtcaagagggaagggcctagga

SEQ ID NO: 7812 - DNA, 35 bp, Artificial Sequence
  Synthetic oligonucleotide
gatgcaacgcaaatgcactgtgcgtgctctccgaa

SEQ ID NO: 7813 - DNA, 35 bp, Artificial Sequence
  Synthetic oligonucleotide
gcacccgcaagactgaattagatcatgtttaccgt

SEQ ID NO: 7814 - DNA, 35 bp, Artificial Sequence
  Synthetic oligonucleotide
gcacgaccgggagtagggactgtatcgatcatttg

SEQ ID NO: 7815 - DNA, 37 bp, Artificial Sequence
  Synthetic oligonucleotide
ggggagacgcgaccagcgtatccgcacgtaacattga

SEQ ID NO: 7816 - DNA, 35 bp, Artificial Sequence
  Synthetic oligonucleotide
gtgccacaagtcgatgcaccgatctacacctcaac

SEQ ID NO: 7817 - DNA, 36 bp, Artificial Sequence
  Synthetic oligonucleotide
gtgccacgaagtgttgagatacgatgctgctcacga

SEQ ID NO: 7818 - DNA, 37 bp, Artificial Sequence
  Synthetic oligonucleotide
gtgggacaggagaggggaattttcttgacagtccgga

SEQ ID NO: 7819 - DNA, 37 bp, Artificial Sequence
  Synthetic oligonucleotide
gttcaacacaggacacaaagaacaggctattgctaga

SEQ ID NO: 7820 - DNA, 37 bp, Artificial Sequence
  Synthetic oligonucleotide
taaccgggtgggtgtggtgggttcggtgaatgtagga

SEQ ID NO: 7821 - DNA, 38 bp, Artificial Sequence
  Synthetic oligonucleotide
tcaaaccccaccgccgaatgtcaacaaagtggagctga

SEQ ID NO: 7822 - DNA, 35 bp, Artificial Sequence
  Synthetic oligonucleotide
tcaaagggccggccattcttaacgagtgaacatca

SEQ ID NO: 7823 - DNA, 36 bp, Artificial Sequence
  Synthetic oligonucleotide
tcaacggtcggactatacaaagatcaggggaactta

SEQ ID NO: 7824 - DNA, 35 bp, Artificial Sequence
  Synthetic oligonucleotide
tgacccatgctaacccctcacaaaatgtacgacgc

SEQ ID NO: 7825 - DNA, 36 bp, Artificial Sequence
  Synthetic oligonucleotide
tgccacctgccactgtgcatcgtacctcgtgcctaa

SEQ ID NO: 7826 - DNA, 38 bp, Artificial Sequence
  Synthetic oligonucleotide
tgtctgcaagatacagcgcagtccgtcggcttaagtga

SEQ ID NO: 7827 - DNA, 37 bp, Artificial Sequence
  Synthetic oligonucleotide
aaatacaaccccgatccgaccccgctgctcgtacgga

SEQ ID NO: 7828 - DNA, 38 bp, Artificial Sequence
  Synthetic oligonucleotide
accgacaggaaggcggtcatgttacggactcagtgtga

SEQ ID NO: 7829 - DNA, 37 bp, Artificial Sequence
  Synthetic oligonucleotide
gacacagtcgccatttgcagtacagtcttggcgcaga

SEQ ID NO: 7830 - DNA, 35 bp, Artificial Sequence
  Synthetic oligonucleotide
gacgagcaggagaacgattcggtaagcagtgtggg

SEQ ID NO: 7831 - DNA, 35 bp, Artificial Sequence
  Synthetic oligonucleotide
gactaccaaccccgaccagacctttgatcccttcg

SEQ ID NO: 7832 - DNA, 35 bp, Artificial Sequence
  Synthetic oligonucleotide
gagaccaacacctaccacgtccgcatcgtttgctc

SEQ ID NO: 7833 - DNA, 35 bp, Artificial Sequence
  Synthetic oligonucleotide
gatgcgaagccatacacctgtagcatcttgctctg

SEQ ID NO: 7834 - DNA, 37 bp, Artificial Sequence
  Synthetic oligonucleotide
gcactaaccccaactactgaccccgcctcgaaccgga

SEQ ID NO: 7835 - DNA, 35 bp, Artificial Sequence
  Synthetic oligonucleotide
gcactgtcgagggaggccagggcgcataattattg

SEQ ID NO: 7836 - DNA, 37 bp, Artificial Sequence
  Synthetic oligonucleotide
gcatcgagcacaatggttatatggactcagcacctga

SEQ ID NO: 7837 - DNA, 35 bp, Artificial Sequence
  Synthetic oligonucleotide
gcatgcagttagcctacaccaattccgtacttcgt

SEQ ID NO: 7838 - DNA, 36 bp, Artificial Sequence
  Synthetic oligonucleotide
gccacacagggttaaattagtgccgactgttggata

SEQ ID NO: 7839 - DNA, 35 bp, Artificial Sequence
  Synthetic oligonucleotide
gccacagactgaagttatatgtagccttcccttat

SEQ ID NO: 7840 - DNA, 36 bp, Artificial Sequence
  Synthetic oligonucleotide
gccgaccaggcactggactggagtcactcgacccta

SEQ ID NO: 7841 - DNA, 36 bp, Artificial Sequence
  Synthetic oligonucleotide
gtccaccgaggaacgtcccatcgacgaggaactcta

SEQ ID NO: 7842 - DNA, 37 bp, Artificial Sequence
  Synthetic oligonucleotide
gtccgaggaagtgtctcaaggtcgttaaacctattga

SEQ ID NO: 7843 - DNA, 35 bp, Artificial Sequence
  Synthetic oligonucleotide
gttgcatcacatagtcgcatagtccgcagtatcaa

SEQ ID NO: 7844 - DNA, 35 bp, Artificial Sequence
  Synthetic oligonucleotide
tcacccgacgtctccgtccatgaatgctcgacatc

SEQ ID NO: 7845 - DNA, 35 bp, Artificial Sequence
  Synthetic oligonucleotide
tcaccctgccatatccaccgagagcctacaatcgc

SEQ ID NO: 7846 - DNA, 36 bp, Artificial Sequence
  Synthetic oligonucleotide
tgacgcacaaccctcgctgtggtgtcgaagctagga

SEQ ID NO: 7847 - DNA, 35 bp, Artificial Sequence
  Synthetic oligonucleotide
tgcggagcaacgcgaaatccagaaccaggaaaggt

SEQ ID NO: 7848 - DNA, 38 bp, Artificial Sequence
  Synthetic oligonucleotide
aacaacaccgcagtgaacttcgagacgtagctggctga

SEQ ID NO: 7849 - DNA, 37 bp, Artificial Sequence
  Synthetic oligonucleotide
acaacaaccgcatgggaggcccaaccatcgtagacga

SEQ ID NO: 7850 - DNA, 36 bp, Artificial Sequence
  Synthetic oligonucleotide
acacgcaacggagaggtagccagagtcggagttgca

SEQ ID NO: 7851 - DNA, 35 bp, Artificial Sequence
  Synthetic oligonucleotide
accaacacacacccgtcggccataagagaaggacc

SEQ ID NO: 7852 - DNA, 37 bp, Artificial Sequence
  Synthetic oligonucleotide
atccgccggagacggactgacaagctcagttctctga

SEQ ID NO: 7853 - DNA, 35 bp, Artificial Sequence
  Synthetic oligonucleotide
gaccacgctcctcatcagactggacactggggtgc

SEQ ID NO: 7854 - DNA, 35 bp, Artificial Sequence
  Synthetic oligonucleotide
gacgacaacacagcctacaacaagggttaaggacc

SEQ ID NO: 7855 - DNA, 38 bp, Artificial Sequence
  Synthetic oligonucleotide
gcatccgacgcaatggtatgaaggagtttgatgagtga

SEQ ID NO: 7856 - DNA, 35 bp, Artificial Sequence
  Synthetic oligonucleotide
gccgagcaaccacactgaaacgacgtcaacatcaa

SEQ ID NO: 7857 - DNA, 35 bp, Artificial Sequence
  Synthetic oligonucleotide
gcctaacccacggtatgaggagccgacgaactcca

SEQ ID NO: 7858 - DNA, 36 bp, Artificial Sequence
  Synthetic oligonucleotide
gcgacataacgccgagcctaagaaatgtcgattcga

SEQ ID NO: 7859 - DNA, 38 bp, Artificial Sequence
  Synthetic oligonucleotide
ggagccagacggtcggtatccgtatagggactagctga

SEQ ID NO: 7860 - DNA, 37 bp, Artificial Sequence
  Synthetic oligonucleotide
gtgacacaccgccggacgagcacaagctgacgcatga

SEQ ID NO: 7861 - DNA, 36 bp, Artificial Sequence
  Synthetic oligonucleotide
tgacgcgggcacaatcatttaaggaccaagggggta

SEQ ID NO: 7862 - DNA, 37 bp, Artificial Sequence
  Synthetic oligonucleotide
tgcgggacaaaggttgtaagagcacttcaaataagga

SEQ ID NO: 7863 - DNA, 36 bp, Artificial Sequence
  Synthetic oligonucleotide
atctgcacaggccgtccctattacctagccttataa

SEQ ID NO: 7864 - DNA, 37 bp, Artificial Sequence
  Synthetic oligonucleotide
gaatagcgacatgtactcaggacattgctcaggcgga

SEQ ID NO: 7865 - DNA, 37 bp, Artificial Sequence
  Synthetic oligonucleotide
gaatgcgcaagtatggataactgaacggtgcacctga

SEQ ID NO: 7866 - DNA, 34 bp, Artificial Sequence
  Synthetic oligonucleotide
gacatgaacgcatgtaataagaagcgtctgcaca

SEQ ID NO: 7867 - DNA, 36 bp, Artificial Sequence
  Synthetic oligonucleotide
gcaacaatcgctgcttggattggcgggctacgtgaa

SEQ ID NO: 7868 - DNA, 35 bp, Artificial Sequence
  Synthetic oligonucleotide
gcccagggggggacggagatgcagtaaatagaaac

SEQ ID NO: 7869 - DNA, 37 bp, Artificial Sequence
  Synthetic oligonucleotide
ggaccgcttacatgcaagtgcgatcccaatctaacga

SEQ ID NO: 7870 - DNA, 35 bp, Artificial Sequence
  Synthetic oligonucleotide
taccgcccacgaagaccagtacaagtgtccatgcg

SEQ ID NO: 7871 - DNA, 35 bp, Artificial Sequence
  Synthetic oligonucleotide
tcactcgcaagcaggcgattatcaatcaggtcccg

SEQ ID NO: 7872 - DNA, 35 bp, Artificial Sequence
  Synthetic oligonucleotide
tgaaccgcgcgggctttacagagctttagaacgtg

SEQ ID NO: 7873 - DNA, 37 bp, Artificial Sequence
  Synthetic oligonucleotide
tgaccgcaacagtgggtaaacatgacgatggggtaga

SEQ ID NO: 7874 - DNA, 34 bp, Artificial Sequence
  Synthetic oligonucleotide
tgactggacgcggtcgggtgtccaccgcgggact

SEQ ID NO: 7875 - DNA, 37 bp, Artificial Sequence
  Synthetic oligonucleotide
ttagcgccacggtcagagcggtgtgtccgaatcctga

SEQ ID NO: 7876 - DNA, 36 bp, Artificial Sequence
  Synthetic oligonucleotide
aaagaccgaaccccgtcgtaaaagcagcctgtatta

SEQ ID NO: 7877 - DNA, 38 bp, Artificial Sequence
  Synthetic oligonucleotide
aacacacgccggatgcatttacaggacaccccaagtga

SEQ ID NO: 7878 - DNA, 36 bp, Artificial Sequence
  Synthetic oligonucleotide
aacgcggggtaagtgtagttcctgaagacgtgacga

SEQ ID NO: 7879 - DNA, 35 bp, Artificial Sequence
  Synthetic oligonucleotide
acatcatcacaccagaacgttagccacgagtattg

SEQ ID NO: 7880 - DNA, 36 bp, Artificial Sequence
  Synthetic oligonucleotide
actgcccatggtccttaaacaactacccacaactta

SEQ ID NO: 7881 - DNA, 35 bp, Artificial Sequence
  Synthetic oligonucleotide
atcccaaccgtcatggtgcatatgtacaagcagga

SEQ ID NO: 7882 - DNA, 36 bp, Artificial Sequence
  Synthetic oligonucleotide
gacacccgccccatgtaccaaggttccttcatgaca

SEQ ID NO: 7883 - DNA, 38 bp, Artificial Sequence
  Synthetic oligonucleotide
gacacgatggaggcaactcgttcggctcaactatttga

SEQ ID NO: 7884 - DNA, 36 bp, Artificial Sequence
  Synthetic oligonucleotide
gacacgccatacgtatggataagtggctgtgctaaa

SEQ ID NO: 7885 - DNA, 36 bp, Artificial Sequence
  Synthetic oligonucleotide
gaccgcgcgagaaggtactggtcgttgcttatgaaa

SEQ ID NO: 7886 - DNA, 38 bp, Artificial Sequence
  Synthetic oligonucleotide
gatgcacggcccatgtagatccaacgcccggaaagtga

SEQ ID NO: 7887 - DNA, 37 bp, Artificial Sequence
  Synthetic oligonucleotide
gcgaggtgcacggcatattgctagttccagtcgggga

SEQ ID NO: 7888 - DNA, 35 bp, Artificial Sequence
  Synthetic oligonucleotide
gtctctgtcgacgcgcgctccctcacctttcacga

SEQ ID NO: 7889 - DNA, 38 bp, Artificial Sequence
  Synthetic oligonucleotide
gtgaaccgtgagtcgagaaggtggagattttgaggtga

SEQ ID NO: 7890 - DNA, 37 bp, Artificial Sequence
  Synthetic oligonucleotide
gtgggagggaggaacatggaacgagacactgacccga

SEQ ID NO: 7891 - DNA, 38 bp, Artificial Sequence
  Synthetic oligonucleotide
tagtgcccctgaccccgcttgaacgccatgcttgctga

SEQ ID NO: 7892 - DNA, 36 bp, Artificial Sequence
  Synthetic oligonucleotide
tgacgcggtagttgaccgttcctgtcgatgaagaca

SEQ ID NO: 7893 - DNA, 35 bp, Artificial Sequence
  Synthetic oligonucleotide
aacgcatcgcacatggtcgtagtttctgtcgggtg

SEQ ID NO: 7894 - DNA, 38 bp, Artificial Sequence
  Synthetic oligonucleotide
atgcgacgcagaatggggaaacaaggacgtcaacgtga

SEQ ID NO: 7895 - DNA, 35 bp, Artificial Sequence
  Synthetic oligonucleotide
gacacgtgctgctgtttttggaacgaccgggcagg

SEQ ID NO: 7896 - DNA, 38 bp, Artificial Sequence
  Synthetic oligonucleotide
gactcggggagctggaaagggagatgaaactgatgtga

SEQ ID NO: 7897 - DNA, 38 bp, Artificial Sequence
  Synthetic oligonucleotide
gagccgtgctaggtgtaatcaatagccctcgacggtga

SEQ ID NO: 7898 - DNA, 36 bp, Artificial Sequence
  Synthetic oligonucleotide
gcaccaccgaaagggaactgtcgtaaaggtctacaa

SEQ ID NO: 7899 - DNA, 35 bp, Artificial Sequence
  Synthetic oligonucleotide
gcatgcacagtcagtggagcatgtgcatacttacg

SEQ ID NO: 7900 - DNA, 36 bp, Artificial Sequence
  Synthetic oligonucleotide
gccatccgccgctgagttatgacgaagagaccatca

SEQ ID NO: 7901 - DNA, 36 bp, Artificial Sequence
  Synthetic oligonucleotide
gccatgaagctcctatgtgtgtaactactaatcgaa

SEQ ID NO: 7902 - DNA, 36 bp, Artificial Sequence
  Synthetic oligonucleotide
gtctacaagcgtgagtagctccatgacagttggcga

SEQ ID NO: 7903 - DNA, 35 bp, Artificial Sequence
  Synthetic oligonucleotide
gtgcaacccacctattcgccttcccgccatctctt

SEQ ID NO: 7904 - DNA, 36 bp, Artificial Sequence
  Synthetic oligonucleotide
taccggacacatcgctgtttcatggaggcacgagga

SEQ ID NO: 7905 - DNA, 36 bp, Artificial Sequence
  Synthetic oligonucleotide
tatgccgggaggtagaaagagtggtcgtagacgtga

SEQ ID NO: 7906 - DNA, 38 bp, Artificial Sequence
  Synthetic oligonucleotide
tccacacaccgttcttgaggacgcgccactcagtatga

SEQ ID NO: 7907 - DNA, 35 bp, Artificial Sequence
  Synthetic oligonucleotide
tccatcgcccaaaactgtaagacgtcccataccac

SEQ ID NO: 7908 - DNA, 35 bp, Artificial Sequence
  Synthetic oligonucleotide
tcggacgcccgatcttcgatgtgagtaggtcttag

SEQ ID NO: 7909 - DNA, 37 bp, Artificial Sequence
  Synthetic oligonucleotide
tgccgaacctggtatgaggcacctcctggggaatgga

SEQ ID NO: 7910 - DNA, 36 bp, Artificial Sequence
  Synthetic oligonucleotide
tgtcaaccaaccaacaacggtcagtagagcgcacta

SEQ ID NO: 7911 - DNA, 36 bp, Artificial Sequence
  Synthetic oligonucleotide
aacgcctgccggacgtatagagtcggtttgctgcaa

SEQ ID NO: 7912 - DNA, 35 bp, Artificial Sequence
  Synthetic oligonucleotide
acaaccatcgttcaccacgtactactgactggctg

SEQ ID NO: 7913 - DNA, 35 bp, Artificial Sequence
  Synthetic oligonucleotide
gacccacgacacaggtgaggtactttagtcataca

SEQ ID NO: 7914 - DNA, 35 bp, Artificial Sequence
  Synthetic oligonucleotide
gaccgcatcaggggggtcactctgctactgcttag

SEQ ID NO: 7915 - DNA, 37 bp, Artificial Sequence
  Synthetic oligonucleotide
gagggcacatcacttacgacaagacgacgcgtagaga

SEQ ID NO: 7916 - DNA, 37 bp, Artificial Sequence
  Synthetic oligonucleotide
gcactcacagcaggctacgttactattgaacaggaga

SEQ ID NO: 7917 - DNA, 36 bp, Artificial Sequence
  Synthetic oligonucleotide
gccaaccgaggtaaggaaggactagggaatgcttaa

SEQ ID NO: 7918 - DNA, 35 bp, Artificial Sequence
  Synthetic oligonucleotide
gctgcaacccattgaaccgtgactcccaaggcacc

SEQ ID NO: 7919 - DNA, 35 bp, Artificial Sequence
  Synthetic oligonucleotide
ggtgccaaccacctgtcgtgccataaagtccctat

SEQ ID NO: 7920 - DNA, 37 bp, Artificial Sequence
  Synthetic oligonucleotide
gtccacccgaccccgcatatccggcctaaccccgtga

SEQ ID NO: 7921 - DNA, 36 bp, Artificial Sequence
  Synthetic oligonucleotide
gttggtcaagtgcgcaaagatgtacggtctggcaaa

SEQ ID NO: 7922 - DNA, 36 bp, Artificial Sequence
  Synthetic oligonucleotide
tccaacgtcccaacgttaagtactagcgtccagtga

SEQ ID NO: 7923 - DNA, 35 bp, Artificial Sequence
  Synthetic oligonucleotide
tccgaccgatactggggtcttatgcgctcgattcg

SEQ ID NO: 7924 - DNA, 38 bp, Artificial Sequence
  Synthetic oligonucleotide
tccgagacatcaggacgtgatgacgcaagccatattga

SEQ ID NO: 7925 - DNA, 35 bp, Artificial Sequence
  Synthetic oligonucleotide
tgacgcagaacgccggatcgcgtgaatcgagataa

SEQ ID NO: 7926 - DNA, 37 bp, Artificial Sequence
  Synthetic oligonucleotide
tgctgggccacgatactgagacatccgctttccttga

SEQ ID NO: 7927 - DNA, 38 bp, Artificial Sequence
  Synthetic oligonucleotide
acaaacgcagggatgaggtctatcacaaggactcttga

SEQ ID NO: 7928 - DNA, 36 bp, Artificial Sequence
  Synthetic oligonucleotide
acacgcagttaggatcagatcgaggccatctcgcga

SEQ ID NO: 7929 - DNA, 35 bp, Artificial Sequence
  Synthetic oligonucleotide
acatcgcgcaggcaaacttgcactccgaccccgaa

SEQ ID NO: 7930 - DNA, 35 bp, Artificial Sequence
  Synthetic oligonucleotide
accacggtacagtttacagcataatgccctttgca

SEQ ID NO: 7931 - DNA, 35 bp, Artificial Sequence
  Synthetic oligonucleotide
cacgacacgagccgcacgccatgtgagtaagcaag

SEQ ID NO: 7932 - DNA, 37 bp, Artificial Sequence
  Synthetic oligonucleotide
gacgtgcccgaacacgccgcgaacagttcttgtttga

SEQ ID NO: 7933 - DNA, 37 bp, Artificial Sequence
  Synthetic oligonucleotide
gactcgagcaaggtgtagaggtccttctggctccaga

SEQ ID NO: 7934 - DNA, 37 bp, Artificial Sequence
  Synthetic oligonucleotide
gagccaacgcagaccatgcgacaatccaggctcacga

SEQ ID NO: 7935 - DNA, 35 bp, Artificial Sequence
  Synthetic oligonucleotide
gcacacgcccatgggtgctacgcggggaacgggga

SEQ ID NO: 7936 - DNA, 35 bp, Artificial Sequence
  Synthetic oligonucleotide
gcacccggcacaacgtgcgtaacgtcccgcgcatc

SEQ ID NO: 7937 - DNA, 38 bp, Artificial Sequence
  Synthetic oligonucleotide
gccaacgcaccgacggacccacaccctctacatcttga

SEQ ID NO: 7938 - DNA, 38 bp, Artificial Sequence
  Synthetic oligonucleotide
gccgacactccacacagcctgggtcttcaccctattga

SEQ ID NO: 7939 - DNA, 36 bp, Artificial Sequence
  Synthetic oligonucleotide
ggaccgacgcagcatcttgtcatggactgcaaacga

SEQ ID NO: 7940 - DNA, 35 bp, Artificial Sequence
  Synthetic oligonucleotide
taccaaccactgtaaaggcacacacgtccctgact

SEQ ID NO: 7941 - DNA, 37 bp, Artificial Sequence
  Synthetic oligonucleotide
tagcgaacgagcataggagttgtgaacctgcccatga

SEQ ID NO: 7942 - DNA, 38 bp, Artificial Sequence
  Synthetic oligonucleotide
tccacaagccagtaggtaagacagggcgtgttacctga

SEQ ID NO: 7943 - DNA, 35 bp, Artificial Sequence
  Synthetic oligonucleotide
tccctgccgccgactatctactgaccccgcaatcc

SEQ ID NO: 7944 - DNA, 38 bp, Artificial Sequence
  Synthetic oligonucleotide
tgacaaccccgtcgtgcgattggcgtgttattatttga

SEQ ID NO: 7945 - DNA, 35 bp, Artificial Sequence
  Synthetic oligonucleotide
tgacgggccatagtcgccgcacatatataatccgc

SEQ ID NO: 7946 - DNA, 38 bp, Artificial Sequence
  Synthetic oligonucleotide
ttaggccgtacactgaccccgatcaagaccacacgtga

SEQ ID NO: 7947 - DNA, 35 bp, Artificial Sequence
  Synthetic oligonucleotide
gacaaccccctccacgccccaacgatctgactgca

SEQ ID NO: 7948 - DNA, 37 bp, Artificial Sequence
  Synthetic oligonucleotide
gaccggtcaacgacacgcataagcgaggcctcatgga

SEQ ID NO: 7949 - DNA, 36 bp, Artificial Sequence
  Synthetic oligonucleotide
gactgcgccgcctgaatgtgtggttagtgcgaagaa

SEQ ID NO: 7950 - DNA, 36 bp, Artificial Sequence
  Synthetic oligonucleotide
gagacgcaggcaatctggactatacaaaatgggaaa

SEQ ID NO: 7951 - DNA, 36 bp, Artificial Sequence
  Synthetic oligonucleotide
gcgtgggcacgtacatcactcacttttaccttttca

SEQ ID NO: 7952 - DNA, 38 bp, Artificial Sequence
  Synthetic oligonucleotide
gtgacgcaaatcgttcaacgacgtactgacagaattga

SEQ ID NO: 7953 - DNA, 36 bp, Artificial Sequence
  Synthetic oligonucleotide
tccactcgtaacagatcggtagtgcggaagttggga

SEQ ID NO: 7954 - DNA, 36 bp, Artificial Sequence
  Synthetic oligonucleotide
atgacatgccgccgatcggagcataggtggagagta

SEQ ID NO: 7955 - DNA, 35 bp, Artificial Sequence
  Synthetic oligonucleotide
cacgcaaacgacctgccgctagtgattagaacact

SEQ ID NO: 7956 - DNA, 38 bp, Artificial Sequence
  Synthetic oligonucleotide
gaccacgcggacgagataaaaggcgggaaatctgatga

SEQ ID NO: 7957 - DNA, 35 bp, Artificial Sequence
  Synthetic oligonucleotide
gaccgtgcatcagaaatccaagaagttcacacgtg

SEQ ID NO: 7958 - DNA, 35 bp, Artificial Sequence
  Synthetic oligonucleotide
gatggccatgaaacgccctcatcgccgttgagagg

SEQ ID NO: 7959 - DNA, 35 bp, Artificial Sequence
  Synthetic oligonucleotide
gatgggcgcaaggtagcccctatagccctgtggat

SEQ ID NO: 7960 - DNA, 38 bp, Artificial Sequence
  Synthetic oligonucleotide
gcaactggcgcgcactcatggcattgaactccttatga

SEQ ID NO: 7961 - DNA, 38 bp, Artificial Sequence
  Synthetic oligonucleotide
gcaccaggggaggtgttcctagcgctaggtagtcttga

SEQ ID NO: 7962 - DNA, 35 bp, Artificial Sequence
  Synthetic oligonucleotide
gcatacgcccacgtggacatagtcataggcccact

SEQ ID NO: 7963 - DNA, 35 bp, Artificial Sequence
  Synthetic oligonucleotide
gcatccgcccggcataacttttcactaccttttcg

SEQ ID NO: 7964 - DNA, 38 bp, Artificial Sequence
  Synthetic oligonucleotide
gccaaacgctaactgtgcacttccgacgcctcccctga

SEQ ID NO: 7965 - DNA, 35 bp, Artificial Sequence
  Synthetic oligonucleotide
gccaccacctgacattctggatcttgctacctttt

SEQ ID NO: 7966 - DNA, 37 bp, Artificial Sequence
  Synthetic oligonucleotide
gccacgctggtcacggagagctactgagagaatacga

SEQ ID NO: 7967 - DNA, 36 bp, Artificial Sequence
  Synthetic oligonucleotide
gtacacagtcgcgctaatcagtgatgaaagggccta

SEQ ID NO: 7968 - DNA, 37 bp, Artificial Sequence
  Synthetic oligonucleotide
tcaggactgccagaggggagtcaagacatatccaaga

SEQ ID NO: 7969 - DNA, 35 bp, Artificial Sequence
  Synthetic oligonucleotide
tgtactagccgggcgatcccgaccccgaactgacc

SEQ ID NO: 7970 - DNA, 35 bp, Artificial Sequence
  Synthetic oligonucleotide
acaccggagccgcggatgatcgataccacactgag

SEQ ID NO: 7971 - DNA, 37 bp, Artificial Sequence
  Synthetic oligonucleotide
acaccgggtccagtgtacttccttctcagacgggtga

SEQ ID NO: 7972 - DNA, 35 bp, Artificial Sequence
  Synthetic oligonucleotide
acccacgcaaggctcaatcagggacgactgtcacg

SEQ ID NO: 7973 - DNA, 35 bp, Artificial Sequence
  Synthetic oligonucleotide
acccctaaaaaccagaccccgacctatgagatcga

SEQ ID NO: 7974 - DNA, 36 bp, Artificial Sequence
  Synthetic oligonucleotide
atgccaccgtgggaagcgtgctacaaggatcgggaa

SEQ ID NO: 7975 - DNA, 37 bp, Artificial Sequence
  Synthetic oligonucleotide
gacaacgcccacccaaggatcaagcacttctggacga

SEQ ID NO: 7976 - DNA, 36 bp, Artificial Sequence
  Synthetic oligonucleotide
gataacgctgccacgacaatctagacatctcctcta

SEQ ID NO: 7977 - DNA, 37 bp, Artificial Sequence
  Synthetic oligonucleotide
gatccaggccgcccgggaccaatgatctctgacttga

SEQ ID NO: 7978 - DNA, 35 bp, Artificial Sequence
  Synthetic oligonucleotide
gccaaagccggactgcgcatgcgtatgcgtacaca

SEQ ID NO: 7979 - DNA, 35 bp, Artificial Sequence
  Synthetic oligonucleotide
gccggaggcgaaccaccgtaagtcgacatggctca

SEQ ID NO: 7980 - DNA, 37 bp, Artificial Sequence
  Synthetic oligonucleotide
gtgctgctccacactgaccactgagtcaacgcgatga

SEQ ID NO: 7981 - DNA, 35 bp, Artificial Sequence
  Synthetic oligonucleotide
tagccggatcgccggatacatcgtccaaggatggt

SEQ ID NO: 7982 - DNA, 36 bp, Artificial Sequence
  Synthetic oligonucleotide
tcacccagcactcactcaccaacacgaccacaccaa

SEQ ID NO: 7983 - DNA, 37 bp, Artificial Sequence
  Synthetic oligonucleotide
tccacacgtcgctatacagtaggaagtatccttgtga

SEQ ID NO: 7984 - DNA, 35 bp, Artificial Sequence
  Synthetic oligonucleotide
tgtgacgcaacggccctaagctagcttatcatagg

SEQ ID NO: 7985 - DNA, 38 bp, Artificial Sequence
  Synthetic oligonucleotide
aaccaggcggccattctgacaagtacaggacggtctga

SEQ ID NO: 7986 - DNA, 36 bp, Artificial Sequence
  Synthetic oligonucleotide
acacacgtccgtgggcgtgagtgcaggttcatggta

SEQ ID NO: 7987 - DNA, 37 bp, Artificial Sequence
  Synthetic oligonucleotide
acctgccccagcagtattctactcgcggagtttagga

SEQ ID NO: 7988 - DNA, 38 bp, Artificial Sequence
  Synthetic oligonucleotide
agtgccaaacccgtcactgcatgtgggagggcatgtga

SEQ ID NO: 7989 - DNA, 35 bp, Artificial Sequence
  Synthetic oligonucleotide
atcgagtagcagtctgccttcttcaacgttcccgg

SEQ ID NO: 7990 - DNA, 35 bp, Artificial Sequence
  Synthetic oligonucleotide
gacacatcagacgtggtctaggtgcgacgcattgt

SEQ ID NO: 7991 - DNA, 37 bp, Artificial Sequence
  Synthetic oligonucleotide
gaccaacccaaatattccggcgaggttgattactgga

SEQ ID NO: 7992 - DNA, 37 bp, Artificial Sequence
  Synthetic oligonucleotide
gactggccggaaacactacacgtgccatcctgtcgga

SEQ ID NO: 7993 - DNA, 35 bp, Artificial Sequence
  Synthetic oligonucleotide
gcacacaccgggcaagtttgtagctcagaatttgg

SEQ ID NO: 7994 - DNA, 36 bp, Artificial Sequence
  Synthetic oligonucleotide
gcacccatgcgcggactgccgttaggttaagaggga

SEQ ID NO: 7995 - DNA, 36 bp, Artificial Sequence
  Synthetic oligonucleotide
gccaaccgccacagtgccattcgacgattgcgtcaa

SEQ ID NO: 7996 - DNA, 37 bp, Artificial Sequence
  Synthetic oligonucleotide
gccacagtccaggtatatcagcttcacacgtcaagga

SEQ ID NO: 7997 - DNA, 35 bp, Artificial Sequence
  Synthetic oligonucleotide
ggaccgccaggccaccaacaacaaccgcaccaatc

SEQ ID NO: 7998 - DNA, 36 bp, Artificial Sequence
  Synthetic oligonucleotide
gtcacacacagcgcctcagatctctagtggctaaga

SEQ ID NO: 7999 - DNA, 35 bp, Artificial Sequence
  Synthetic oligonucleotide
gtgcacgaggtgcgcacgataatcagatctaccgc

SEQ ID NO: 8000 - DNA, 38 bp, Artificial Sequence
  Synthetic oligonucleotide
tcaccgcgagtacgattcgggacagcatttttgggtga

SEQ ID NO: 8001 - DNA, 35 bp, Artificial Sequence
  Synthetic oligonucleotide
aatgcacagcaggtgggctcgacgtacacgtggcg

SEQ ID NO: 8002 - DNA, 36 bp, Artificial Sequence
  Synthetic oligonucleotide
acaacgcgatcctatggttggaacagtatgctaata

SEQ ID NO: 8003 - DNA, 35 bp, Artificial Sequence
  Synthetic oligonucleotide
atgccaaccgtggcgcatgtcgtatcgttcctgcc

SEQ ID NO: 8004 - DNA, 35 bp, Artificial Sequence
  Synthetic oligonucleotide
atgcccacaacgtacgtgagcgcattcctattgtt

SEQ ID NO: 8005 - DNA, 37 bp, Artificial Sequence
  Synthetic oligonucleotide
ccaggctcacgacaagtgggtatccgagtccggttga

SEQ ID NO: 8006 - DNA, 36 bp, Artificial Sequence
  Synthetic oligonucleotide
cccaagcaaagacccccagacattgtgtacggctca

SEQ ID NO: 8007 - DNA, 37 bp, Artificial Sequence
  Synthetic oligonucleotide
gacgcatgtcggaatcgatagtcctaccgtcggaaga

SEQ ID NO: 8008 - DNA, 36 bp, Artificial Sequence
  Synthetic oligonucleotide
gagacctaccgctagataggatttgtcgactacaca

SEQ ID NO: 8009 - DNA, 36 bp, Artificial Sequence
  Synthetic oligonucleotide
gagatgtccgccagtgtgtcagacaggtggaacgca

SEQ ID NO: 8010 - DNA, 35 bp, Artificial Sequence
  Synthetic oligonucleotide
gcaaacgaccactcactgcaacaggcacagtactg

SEQ ID NO: 8011 - DNA, 38 bp, Artificial Sequence
  Synthetic oligonucleotide
gcaaagccggcactcctaggatattgagctacaattga

SEQ ID NO: 8012 - DNA, 35 bp, Artificial Sequence
  Synthetic oligonucleotide
gcaacacgcacagttgacttttcttccactactct

SEQ ID NO: 8013 - DNA, 35 bp, Artificial Sequence
  Synthetic oligonucleotide
gcacgatcagtggtccaagtcacctcatcccgttc

SEQ ID NO: 8014 - DNA, 35 bp, Artificial Sequence
  Synthetic oligonucleotide
gccaacgtaaagcagtattaaggacaatagacgag

SEQ ID NO: 8015 - DNA, 38 bp, Artificial Sequence
  Synthetic oligonucleotide
gccatcacccacgccatattggagtagccgcgctgtga

SEQ ID NO: 8016 - DNA, 36 bp, Artificial Sequence
  Synthetic oligonucleotide
gcttgcggccgttacatcacaactagactgatcaca

SEQ ID NO: 8017 - DNA, 35 bp, Artificial Sequence
  Synthetic oligonucleotide
gtgccaggttacattcccaccgagcacagccccta

SEQ ID NO: 8018 - DNA, 35 bp, Artificial Sequence
  Synthetic oligonucleotide
tatgccccagccgtaaccaacaccctgcatagccg

SEQ ID NO: 8019 - DNA, 38 bp, Artificial Sequence
  Synthetic oligonucleotide
tccaacgtaagggagccgtaaggtgccgcagggattga

SEQ ID NO: 8020 - DNA, 37 bp, Artificial Sequence
  Synthetic oligonucleotide
aacgacgggacggagttgctcaactggccgggctgga

SEQ ID NO: 8021 - DNA, 36 bp, Artificial Sequence
  Synthetic oligonucleotide
aacgcacgcagcctagagatgcgtctccaaccttga

SEQ ID NO: 8022 - DNA, 38 bp, Artificial Sequence
  Synthetic oligonucleotide
aacgtcccaacgtgtctgcacctatgccacaattctga

SEQ ID NO: 8023 - DNA, 36 bp, Artificial Sequence
  Synthetic oligonucleotide
accatcggagccacgggtcaaagtgttcaagtcgca

SEQ ID NO: 8024 - DNA, 38 bp, Artificial Sequence
  Synthetic oligonucleotide
accgatgcggtgtggacataagaacctaaatgctatga

SEQ ID NO: 8025 - DNA, 35 bp, Artificial Sequence
  Synthetic oligonucleotide
acgcgcacaaatatcggagcaaatccttccttcgc

SEQ ID NO: 8026 - DNA, 35 bp, Artificial Sequence
  Synthetic oligonucleotide
atccgccccgccgtacgctaacgccccaaacgcca

SEQ ID NO: 8027 - DNA, 35 bp, Artificial Sequence
  Synthetic oligonucleotide
atgccggggacagggggtacaaaattctgccagtc

SEQ ID NO: 8028 - DNA, 36 bp, Artificial Sequence
  Synthetic oligonucleotide
cacgcgggagtgtgacttaccatgaccggaagggca

SEQ ID NO: 8029 - DNA, 36 bp, Artificial Sequence
  Synthetic oligonucleotide
gaaccgcgcagtatctccctacgttaacctcctgaa

SEQ ID NO: 8030 - DNA, 35 bp, Artificial Sequence
  Synthetic oligonucleotide
gacaccatgtggacgtgtaaatgagggtgcgagct

SEQ ID NO: 8031 - DNA, 35 bp, Artificial Sequence
  Synthetic oligonucleotide
gaccacctgaccccgtcctgtatcgccccctaaat

SEQ ID NO: 8032 - DNA, 36 bp, Artificial Sequence
  Synthetic oligonucleotide
gagacgccccagcgactatacgcgtacaattgtcga

SEQ ID NO: 8033 - DNA, 35 bp, Artificial Sequence
  Synthetic oligonucleotide
gcaccacacagtccgtttataagagtcgttcatag

SEQ ID NO: 8034 - DNA, 36 bp, Artificial Sequence
  Synthetic oligonucleotide
gcaccacagcacggaaattatacccatcttggttca

SEQ ID NO: 8035 - DNA, 37 bp, Artificial Sequence
  Synthetic oligonucleotide
gcactcgcccgtagctaacgtaaatggcgtatcgaga

SEQ ID NO: 8036 - DNA, 35 bp, Artificial Sequence
  Synthetic oligonucleotide
gcatccgggacgggtgatcgtacctcttccatgtt

SEQ ID NO: 8037 - DNA, 35 bp, Artificial Sequence
  Synthetic oligonucleotide
gcatgcaccgctgggctacagaagaagggttgaga

SEQ ID NO: 8038 - DNA, 38 bp, Artificial Sequence
  Synthetic oligonucleotide
gcgcacactgaccccgcaatagaggcccctacagatga

SEQ ID NO: 8039 - DNA, 38 bp, Artificial Sequence
  Synthetic oligonucleotide
gtcgcacaacggatttgcggatcgacaggacagtctga

SEQ ID NO: 8040 - DNA, 36 bp, Artificial Sequence
  Synthetic oligonucleotide
gtgcccgcccaaaagatagtcctgtgtcgttgacta

SEQ ID NO: 8041 - DNA, 35 bp, Artificial Sequence
  Synthetic oligonucleotide
tcaagccccagaggcagatgactacaccgatatta

SEQ ID NO: 8042 - DNA, 35 bp, Artificial Sequence
  Synthetic oligonucleotide
aaccgcacatccgcaatccacctcatgcacgcatt

SEQ ID NO: 8043 - DNA, 37 bp, Artificial Sequence
  Synthetic oligonucleotide
acacaccgcaggtgcgaagggatggcgaaaatggcga

SEQ ID NO: 8044 - DNA, 36 bp, Artificial Sequence
  Synthetic oligonucleotide
accgaagcaagctgataagggatttagtgtggtcga

SEQ ID NO: 8045 - DNA, 35 bp, Artificial Sequence
  Synthetic oligonucleotide
actcacgccgaacatgctctacccttgcttaacac

SEQ ID NO: 8046 - DNA, 36 bp, Artificial Sequence
  Synthetic oligonucleotide
gacgacctcacagtgctaccatacagagcaagctaa

SEQ ID NO: 8047 - DNA, 36 bp, Artificial Sequence
  Synthetic oligonucleotide
gactcaggcgcccatcctaggggtacggacgttaga

SEQ ID NO: 8048 - DNA, 38 bp, Artificial Sequence
  Synthetic oligonucleotide
gagcgatgcggggcattagcgaacgtatgcaggactga

SEQ ID NO: 8049 - DNA, 38 bp, Artificial Sequence
  Synthetic oligonucleotide
gatgacgttggctagatgaattgagcgacgcagtgtga

SEQ ID NO: 8050 - DNA, 32 bp, Artificial Sequence
  Synthetic oligonucleotide
gccggaaggcacgagagcagacaccggttagg

SEQ ID NO: 8051 - DNA, 38 bp, Artificial Sequence
  Synthetic oligonucleotide
gctggtgccacgtagaagagaggccgtccgtgatatga

SEQ ID NO: 8052 - DNA, 38 bp, Artificial Sequence
  Synthetic oligonucleotide
gtcaagtgccaaccgcagcaacgactagatgaccctga

SEQ ID NO: 8053 - DNA, 36 bp, Artificial Sequence
  Synthetic oligonucleotide
gttgtgcatgccagcacacggtctgtaggtttccta

SEQ ID NO: 8054 - DNA, 35 bp, Artificial Sequence
  Synthetic oligonucleotide
tgaaccgttgccgcacataaacaccacagtttact

SEQ ID NO: 8055 - DNA, 37 bp, Artificial Sequence
  Synthetic oligonucleotide
aacacgcggccgtggaatctcacgtgagcacgcgaga

SEQ ID NO: 8056 - DNA, 35 bp, Artificial Sequence
  Synthetic oligonucleotide
acaccacggcgagtggattgagggtcgcgaaaacg

SEQ ID NO: 8057 - DNA, 36 bp, Artificial Sequence
  Synthetic oligonucleotide
accacaccagacgcagaattggcgcacatagcgtaa

SEQ ID NO: 8058 - DNA, 35 bp, Artificial Sequence
  Synthetic oligonucleotide
acgcacagtcggagagtttgggcacaccattcttg

SEQ ID NO: 8059 - DNA, 36 bp, Artificial Sequence
  Synthetic oligonucleotide
acgcgcacccacgtctcgttgcatcatttacgttaa

SEQ ID NO: 8060 - DNA, 38 bp, Artificial Sequence
  Synthetic oligonucleotide
atgcccacatcggtcgtgtaaacctaggaatgatgtga

SEQ ID NO: 8061 - DNA, 35 bp, Artificial Sequence
  Synthetic oligonucleotide
atgtcacactggctgaactcgtgtaccctgctgat

SEQ ID NO: 8062 - DNA, 35 bp, Artificial Sequence
  Synthetic oligonucleotide
gacaaggcaaacattgcgagataggagttaagtcg

SEQ ID NO: 8063 - DNA, 38 bp, Artificial Sequence
  Synthetic oligonucleotide
gaccgtgacggtgtacggatcaagatatcactctatga

SEQ ID NO: 8064 - DNA, 35 bp, Artificial Sequence
  Synthetic oligonucleotide
gactggtccgggcttaatgcgtatgtctcgatgcg

SEQ ID NO: 8065 - DNA, 38 bp, Artificial Sequence
  Synthetic oligonucleotide
gatgaccgcggaacaaatgcaagcataaacaaccatga

SEQ ID NO: 8066 - DNA, 36 bp, Artificial Sequence
  Synthetic oligonucleotide
gcacaatgcctgcaatcttggaggacggaggtggta

SEQ ID NO: 8067 - DNA, 36 bp, Artificial Sequence
  Synthetic oligonucleotide
gcaggccaggctgcattttgtccattgtcgacccga

SEQ ID NO: 8068 - DNA, 37 bp, Artificial Sequence
  Synthetic oligonucleotide
gcatccgccgcatgccaagagaagacacggtaccaga

SEQ ID NO: 8069 - DNA, 37 bp, Artificial Sequence
  Synthetic oligonucleotide
gccacgtccggtcaaagcgtggcttcgacagggaaga

SEQ ID NO: 8070 - DNA, 38 bp, Artificial Sequence
  Synthetic oligonucleotide
gccagaccttcgctgcttggaaggtttcaaacggttga

SEQ ID NO: 8071 - DNA, 36 bp, Artificial Sequence
  Synthetic oligonucleotide
tccaacacccctcgcatcatacgacaatcccgtcga

SEQ ID NO: 8072 - DNA, 35 bp, Artificial Sequence
  Synthetic oligonucleotide
tccacacagaacgaccgcgatgaatgaattctcta

SEQ ID NO: 8073 - DNA, 38 bp, Artificial Sequence
  Synthetic oligonucleotide
acacccgcaacagtgggatgaaggacgatagtaagtga

SEQ ID NO: 8074 - DNA, 37 bp, Artificial Sequence
  Synthetic oligonucleotide
acgtgaccgccaacctaaatctaatcacatcgcgtga

SEQ ID NO: 8075 - DNA, 35 bp, Artificial Sequence
  Synthetic oligonucleotide
atcgcacccccaaacactatagactgcattcaagc

SEQ ID NO: 8076 - DNA, 36 bp, Artificial Sequence
  Synthetic oligonucleotide
atgccacagtcaggatcaacaggggataccgtgtga

SEQ ID NO: 8077 - DNA, 35 bp, Artificial Sequence
  Synthetic oligonucleotide
gacggaccgcaaacgtacgcatacaggctcaatct

SEQ ID NO: 8078 - DNA, 37 bp, Artificial Sequence
  Synthetic oligonucleotide
gaggtcgaggcagataccttcctgacatcactaatga

SEQ ID NO: 8079 - DNA, 35 bp, Artificial Sequence
  Synthetic oligonucleotide
gtgccgacaacagcagtgttaaaccacacgtgagt

SEQ ID NO: 8080 - DNA, 36 bp, Artificial Sequence
  Synthetic oligonucleotide
gtgggagggagggccatcggcgtggtgagcggtgta

SEQ ID NO: 8081 - DNA, 35 bp, Artificial Sequence
  Synthetic oligonucleotide
tccaccacccgtcgacccccatcgtcactggaagc

SEQ ID NO: 8082 - DNA, 35 bp, Artificial Sequence
  Synthetic oligonucleotide
tgacaccctgcaatgattgtgacaggaacggtggc

SEQ ID NO: 8083 - DNA, 37 bp, Artificial Sequence
  Synthetic oligonucleotide
tgcgaacgcagtgttgtctctttctctaagccgatga

SEQ ID NO: 8084 - DNA, 35 bp, Artificial Sequence
  Synthetic oligonucleotide
aaccgccgagccctaccgttcgactacctacacgg

SEQ ID NO: 8085 - DNA, 36 bp, Artificial Sequence
  Synthetic oligonucleotide
acagtgccgtgcaggcaaaggaagagtgtcactcca

SEQ ID NO: 8086 - DNA, 36 bp, Artificial Sequence
  Synthetic oligonucleotide
accaccggtgggggtacatcgaaagcatgcagctca

SEQ ID NO: 8087 - DNA, 38 bp, Artificial Sequence
  Synthetic oligonucleotide
acctcacgagcaggtacaagagtgtcattcatgcgtga

SEQ ID NO: 8088 - DNA, 36 bp, Artificial Sequence
  Synthetic oligonucleotide
atgcacggcggacaggcatggtactaaggcagggta

SEQ ID NO: 8089 - DNA, 35 bp, Artificial Sequence
  Synthetic oligonucleotide
atgccacacgccggagagtcgaagaactttgccaa

SEQ ID NO: 8090 - DNA, 37 bp, Artificial Sequence
  Synthetic oligonucleotide
gacaacggacagctgagatttcgtacttctaatcgga

SEQ ID NO: 8091 - DNA, 34 bp, Artificial Sequence
  Synthetic oligonucleotide
gacacaccccctcgaacgtaactcacatggacgc

SEQ ID NO: 8092 - DNA, 35 bp, Artificial Sequence
  Synthetic oligonucleotide
gactcgcagagctggattaagcttttccttattgt

SEQ ID NO: 8093 - DNA, 35 bp, Artificial Sequence
  Synthetic oligonucleotide
gcacacgacggcgatggatagtgccaccctcaacg

SEQ ID NO: 8094 - DNA, 36 bp, Artificial Sequence
  Synthetic oligonucleotide
gccgaaacgtatggcatatgaaaaaggacacggcta

SEQ ID NO: 8095 - DNA, 36 bp, Artificial Sequence
  Synthetic oligonucleotide
gctgaccccggcccaccgttgcaatacccccaggga

SEQ ID NO: 8096 - DNA, 35 bp, Artificial Sequence
  Synthetic oligonucleotide
ggaacatgcagtcgcatatcgcacatcataatcgt

SEQ ID NO: 8097 - DNA, 35 bp, Artificial Sequence
  Synthetic oligonucleotide
taagtcgcaaagaagtttacccgccaactcgtgcc

SEQ ID NO: 8098 - DNA, 35 bp, Artificial Sequence
  Synthetic oligonucleotide
tactgaccccgaaacctgccgtaccccgtccactg

SEQ ID NO: 8099 - DNA, 35 bp, Artificial Sequence
  Synthetic oligonucleotide
tccatcgccagataaagggacgttttaatgagctg

SEQ ID NO: 8100 - DNA, 36 bp, Artificial Sequence
  Synthetic oligonucleotide
tgagcaagaccttttggtcaagctgacccggtgtca

SEQ ID NO: 8101 - DNA, 37 bp, Artificial Sequence
  Synthetic oligonucleotide
tgtgtcacgaatgaacgttcataagcagccatgagga

SEQ ID NO: 8102 - DNA, 35 bp, Artificial Sequence
  Synthetic oligonucleotide
ttgtgagctgcaggcacgcatctacgaggaactcg

SEQ ID NO: 8103 - DNA, 36 bp, Artificial Sequence
  Synthetic oligonucleotide
aaaccacacgcaaggaactgggacagtgtgcctcta

SEQ ID NO: 8104 - DNA, 35 bp, Artificial Sequence
  Synthetic oligonucleotide
aacaacgccggagcaatacgcgccaagtgtaggta

SEQ ID NO: 8105 - DNA, 35 bp, Artificial Sequence
  Synthetic oligonucleotide
aacagccaccaggactcgctataattgagtaggaa

SEQ ID NO: 8106 - DNA, 36 bp, Artificial Sequence
  Synthetic oligonucleotide
aacagccgcaagccctgaatgtattgcagtccttca

SEQ ID NO: 8107 - DNA, 35 bp, Artificial Sequence
  Synthetic oligonucleotide
acaacccgcctcagaccgctaacctcttactcagt

SEQ ID NO: 8108 - DNA, 37 bp, Artificial Sequence
  Synthetic oligonucleotide
actgccaggccaagagcgagtgccaccaatccgtgga

SEQ ID NO: 8109 - DNA, 36 bp, Artificial Sequence
  Synthetic oligonucleotide
actgtgcgcacagcctcaatcatgcggaccttacca

SEQ ID NO: 8110 - DNA, 38 bp, Artificial Sequence
  Synthetic oligonucleotide
ataccaccgccaacgccaacatcattctgcttcgctga

SEQ ID NO: 8111 - DNA, 36 bp, Artificial Sequence
  Synthetic oligonucleotide
attacatgcatactgaccccgtgagactggtgagga

SEQ ID NO: 8112 - DNA, 37 bp, Artificial Sequence
  Synthetic oligonucleotide
attgcgcagaactatgcggcatcagttcactcagaca

SEQ ID NO: 8113 - DNA, 38 bp, Artificial Sequence
  Synthetic oligonucleotide
gaaacgtgcgtgccagacttagtatgttcatcgcttga

SEQ ID NO: 8114 - DNA, 38 bp, Artificial Sequence
  Synthetic oligonucleotide
gacactgccctgggataagcacacgaaccggtaagtga

SEQ ID NO: 8115 - DNA, 35 bp, Artificial Sequence
  Synthetic oligonucleotide
gaccaggcacctaagccaccgcagtgtataaacag

SEQ ID NO: 8116 - DNA, 35 bp, Artificial Sequence
  Synthetic oligonucleotide
gacggaggagggtgtaaaatgcaggctacgagtat

SEQ ID NO: 8117 - DNA, 37 bp, Artificial Sequence
  Synthetic oligonucleotide
gagcaaggtacaaaatgaacacgaagctaagtttaga

SEQ ID NO: 8118 - DNA, 35 bp, Artificial Sequence
  Synthetic oligonucleotide
gcacaaacggggcaggtgagagacgacccagcgat

SEQ ID NO: 8119 - DNA, 35 bp, Artificial Sequence
  Synthetic oligonucleotide
gcaccacgcaaccgctccattcaagtagtcgaaaa

SEQ ID NO: 8120 - DNA, 35 bp, Artificial Sequence
  Synthetic oligonucleotide
gccatacgcacactgattactgcaggcatatcgcc

SEQ ID NO: 8121 - DNA, 36 bp, Artificial Sequence
  Synthetic oligonucleotide
gctgacgtacgatgctataacccggtttcacataca

SEQ ID NO: 8122 - DNA, 38 bp, Artificial Sequence
  Synthetic oligonucleotide
ggtccaggcgcacagactgcaagcgatttccaggttga

SEQ ID NO: 8123 - DNA, 35 bp, Artificial Sequence
  Synthetic oligonucleotide
gtgccgccaagcacacgttgtaagaaaggcgatct

SEQ ID NO: 8124 - DNA, 35 bp, Artificial Sequence
  Synthetic oligonucleotide
gtgcgtgctgcacataaggattcaactgcctccgt

SEQ ID NO: 8125 - DNA, 29 bp, Artificial Sequence
  Synthetic oligonucleotide
tacgcgcaacgccaggttcgcggaacgga

SEQ ID NO: 8126 - DNA, 38 bp, Artificial Sequence
  Synthetic oligonucleotide
tactgccgaacgcgcacgattattgcatgactttttga

SEQ ID NO: 8127 - DNA, 37 bp, Artificial Sequence
  Synthetic oligonucleotide
tcaccccgcacctataattatgaccccgccctgccga

SEQ ID NO: 8128 - DNA, 36 bp, Artificial Sequence
  Synthetic oligonucleotide
tgaccccgatcgagctcgaaaaaaagatgcgtacca

SEQ ID NO: 8129 - DNA, 37 bp, Artificial Sequence
  Synthetic oligonucleotide
acacgcgccgaaacacgttcccattacaggcaataga

SEQ ID NO: 8130 - DNA, 38 bp, Artificial Sequence
  Synthetic oligonucleotide
gacgggaggggggggttatcgtcggtcgaccaggctga

SEQ ID NO: 8131 - DNA, 38 bp, Artificial Sequence
  Synthetic oligonucleotide
gactgcggtcgacgtgggtttagtggtgagcatgttga

SEQ ID NO: 8132 - DNA, 37 bp, Artificial Sequence
  Synthetic oligonucleotide
gagtgcacagcagttattgatcaaacataggccctga

SEQ ID NO: 8133 - DNA, 36 bp, Artificial Sequence
  Synthetic oligonucleotide
gcaacacgcagtccggatcatcttacatacaattca

SEQ ID NO: 8134 - DNA, 37 bp, Artificial Sequence
  Synthetic oligonucleotide
gcacaacccgtcctaacctggtcgacactcgccctga

SEQ ID NO: 8135 - DNA, 36 bp, Artificial Sequence
  Synthetic oligonucleotide
gcgaaaccactgcactcggggctaaggtgaaactca

SEQ ID NO: 8136 - DNA, 38 bp, Artificial Sequence
  Synthetic oligonucleotide
ggacccatcgaacgcccttacgattgtcacttggatga

SEQ ID NO: 8137 - DNA, 35 bp, Artificial Sequence
  Synthetic oligonucleotide
ggacgcccagcaatgccacagagatcgtacgtcaa

SEQ ID NO: 8138 - DNA, 35 bp, Artificial Sequence
  Synthetic oligonucleotide
tacacacccagggcacacccacgtactaggttctg

SEQ ID NO: 8139 - DNA, 35 bp, Artificial Sequence
  Synthetic oligonucleotide
tatcgcgcacctcatgtcaaggtttgtcaaattaa

SEQ ID NO: 8140 - DNA, 38 bp, Artificial Sequence
  Synthetic oligonucleotide
tcacgcacctcagagcactataggacgaatcccaatga

SEQ ID NO: 8141 - DNA, 36 bp, Artificial Sequence
  Synthetic oligonucleotide
tccacagccgtttgatcagtgtgtatcatctttaaa

SEQ ID NO: 8142 - DNA, 35 bp, Artificial Sequence
  Synthetic oligonucleotide
acaccccacagccagtgcttcctacagtcgacaat

SEQ ID NO: 8143 - DNA, 36 bp, Artificial Sequence
  Synthetic oligonucleotide
atgcccgcagggtggagctaaggttgacgtttgaca

SEQ ID NO: 8144 - DNA, 35 bp, Artificial Sequence
  Synthetic oligonucleotide
gagtgcgaacaagctttgtgcgtcattcacgatga

SEQ ID NO: 8145 - DNA, 36 bp, Artificial Sequence
  Synthetic oligonucleotide
gccacccatatgccgtctggactcataattcgatta

SEQ ID NO: 8146 - DNA, 36 bp, Artificial Sequence
  Synthetic oligonucleotide
gccaccgagcgacggagaagagttatgcacgactaa

SEQ ID NO: 8147 - DNA, 38 bp, Artificial Sequence
  Synthetic oligonucleotide
gctgaccagctgtcagaaggtaccggtctctcccctga

SEQ ID NO: 8148 - DNA, 38 bp, Artificial Sequence
  Synthetic oligonucleotide
tacctagcgcacacaccggtcatagcgaaactgcgtga

SEQ ID NO: 8149 - DNA, 36 bp, Artificial Sequence
  Synthetic oligonucleotide
tacgacaccactcagactgcgcattccaatcaccta

SEQ ID NO: 8150 - DNA, 36 bp, Artificial Sequence
  Synthetic oligonucleotide
tatgctgccatcacaacgtctttcagaccacctgca

SEQ ID NO: 8151 - DNA, 38 bp, Artificial Sequence
  Synthetic oligonucleotide
tcacaccgcagtgagtggacgccactcagtcctcttga

SEQ ID NO: 8152 - DNA, 35 bp, Artificial Sequence
  Synthetic oligonucleotide
tcacactcaggcatatctcctactgaccccgaatc

SEQ ID NO: 8153 - DNA, 35 bp, Artificial Sequence
  Synthetic oligonucleotide
tccggacgacagaatacgatcgaggggcctacatc

SEQ ID NO: 8154 - DNA, 38 bp, Artificial Sequence
  Synthetic oligonucleotide
tgagcgacagctaacgtatggccttcacgagacggtga

SEQ ID NO: 8155 - DNA, 38 bp, Artificial Sequence
  Synthetic oligonucleotide
tgatacggaaggaaaagagagggttctcgctaacctga

SEQ ID NO: 8156 - DNA, 35 bp, Artificial Sequence
  Synthetic oligonucleotide
acacacgcaagtcgttgaagtaagtccgggtcaac

SEQ ID NO: 8157 - DNA, 37 bp, Artificial Sequence
  Synthetic oligonucleotide
acacatgccaggattcaagagcggtatgaatcctaga

SEQ ID NO: 8158 - DNA, 37 bp, Artificial Sequence
  Synthetic oligonucleotide
acgcgagggcgagctattgatggaacggatggaaaga

SEQ ID NO: 8159 - DNA, 37 bp, Artificial Sequence
  Synthetic oligonucleotide
gacacaccgctggtggtggaggggattggtgggggga

SEQ ID NO: 8160 - DNA, 37 bp, Artificial Sequence
  Synthetic oligonucleotide
gacgaccgactctcaatgtactattgtagatgtagga

SEQ ID NO: 8161 - DNA, 37 bp, Artificial Sequence
  Synthetic oligonucleotide
gacgacgcccgaagagacctgatcttggaccccgcga

SEQ ID NO: 8162 - DNA, 37 bp, Artificial Sequence
  Synthetic oligonucleotide
gatgcggtcattctggggaaccagaccatctttagga

SEQ ID NO: 8163 - DNA, 35 bp, Artificial Sequence
  Synthetic oligonucleotide
gcacgagcaaagttacgagcctcaaactatgttgt

SEQ ID NO: 8164 - DNA, 35 bp, Artificial Sequence
  Synthetic oligonucleotide
gccaactcggacctaagctagcatcagtcatgctc

SEQ ID NO: 8165 - DNA, 35 bp, Artificial Sequence
  Synthetic oligonucleotide
gcccacgccggtcaagcgcatacgataatatcggc

SEQ ID NO: 8166 - DNA, 38 bp, Artificial Sequence
  Synthetic oligonucleotide
ggatccgcccgtgcggaatggtatcgtgtgtgctgtga

SEQ ID NO: 8167 - DNA, 37 bp, Artificial Sequence
  Synthetic oligonucleotide
taaccgccccaagcataattccgccgtttcatcccga

SEQ ID NO: 8168 - DNA, 36 bp, Artificial Sequence
  Synthetic oligonucleotide
tacgcggtacagtggcgaatgcggtgccttgttcga

SEQ ID NO: 8169 - DNA, 36 bp, Artificial Sequence
  Synthetic oligonucleotide
tccatgtcaagcacgaaaccgtccccgctaccgcaa

SEQ ID NO: 8170 - DNA, 36 bp, Artificial Sequence
  Synthetic oligonucleotide
tgacacgtgcaggtggatttgctgtaggttaactga

SEQ ID NO: 8171 - DNA, 36 bp, Artificial Sequence
  Synthetic oligonucleotide
tgacgagccgcaatacccctgaacctgcgcccgaga

SEQ ID NO: 8172 - DNA, 36 bp, Artificial Sequence
  Synthetic oligonucleotide
tgacgctgaagtaccggtgaggcgaaagttggagta

SEQ ID NO: 8173 - DNA, 37 bp, Artificial Sequence
  Synthetic oligonucleotide
tgaggccgtgcattctaacgtaccatgaaaacttatg

SEQ ID NO: 8174 - DNA, 35 bp, Artificial Sequence
  Synthetic oligonucleotide
tgcgatagcaacacctgttcgaccgtgccccttat

SEQ ID NO: 8175 - DNA, 35 bp, Artificial Sequence
  Synthetic oligonucleotide
tgtgccagcccttggtgctataagtcaacggtgcc

SEQ ID NO: 8176 - DNA, 36 bp, Artificial Sequence
  Synthetic oligonucleotide
aagccgcaacaccgacaacagggatgctctcgcata

SEQ ID NO: 8177 - DNA, 35 bp, Artificial Sequence
  Synthetic oligonucleotide
acccaccgccattatacggtcttgttcaggatcgc

SEQ ID NO: 8178 - DNA, 35 bp, Artificial Sequence
  Synthetic oligonucleotide
acgctcccaagccaaccccttccacccacgcaatg

SEQ ID NO: 8179 - DNA, 38 bp, Artificial Sequence
  Synthetic oligonucleotide
gaaagcacagacggcgtagactagatcacaggcgatga

SEQ ID NO: 8180 - DNA, 37 bp, Artificial Sequence
  Synthetic oligonucleotide
gacacaatccgtaagtggaggacgcaaggcactaaga

SEQ ID NO: 8181 - DNA, 36 bp, Artificial Sequence
  Synthetic oligonucleotide
gacacacgggacccggtgaccgacgcgtatcatcca

SEQ ID NO: 8182 - DNA, 35 bp, Artificial Sequence
  Synthetic oligonucleotide
gaccagcacagatagttgtacgatggtagtctttg

SEQ ID NO: 8183 - DNA, 38 bp, Artificial Sequence
  Synthetic oligonucleotide
gatggtgggctcgaccccgatttttccactgaccctga

SEQ ID NO: 8184 - DNA, 34 bp, Artificial Sequence
  Synthetic oligonucleotide
gcaacccccgctgttacactcctcatttttactg

SEQ ID NO: 8185 - DNA, 35 bp, Artificial Sequence
  Synthetic oligonucleotide
gcacacatccccgtgcgatcgaggggactaacttc

SEQ ID NO: 8186 - DNA, 35 bp, Artificial Sequence
  Synthetic oligonucleotide
gcctcatcccgtagatttatactaatgcgatcctt

SEQ ID NO: 8187 - DNA, 36 bp, Artificial Sequence
  Synthetic oligonucleotide
gtccgccccaagtttagtccaaccccgtacccctta

SEQ ID NO: 8188 - DNA, 36 bp, Artificial Sequence
  Synthetic oligonucleotide
gttgccacccagaccccgtcaactaaccccgttcca

SEQ ID NO: 8189 - DNA, 37 bp, Artificial Sequence
  Synthetic oligonucleotide
gttgcgtgccgaataagatacctatcatatgacctga

SEQ ID NO: 8190 - DNA, 36 bp, Artificial Sequence
  Synthetic oligonucleotide
gttggcgtggggaggcgcatatcggacaccaagata

SEQ ID NO: 8191 - DNA, 35 bp, Artificial Sequence
  Synthetic oligonucleotide
tagcccagccgtggagggtaacgtagcagtgtgat

SEQ ID NO: 8192 - DNA, 37 bp, Artificial Sequence
  Synthetic oligonucleotide
tcactgcaggcatcacccaggtgtacgaatgacggga

SEQ ID NO: 8193 - DNA, 37 bp, Artificial Sequence
  Synthetic oligonucleotide
tcagccggtgacaagacaaaaggctgtcggtggacga

SEQ ID NO: 8194 - DNA, 36 bp, Artificial Sequence
  Synthetic oligonucleotide
tgacaccgcactcttttagtacgtatcaacctacaa

SEQ ID NO: 8195 - DNA, 35 bp, Artificial Sequence
  Synthetic oligonucleotide
tgcgggagcagtgcaagaatcttcggagtacaata

SEQ ID NO: 8196 - DNA, 35 bp, Artificial Sequence
  Synthetic oligonucleotide
aagtgcacagggaggtatgacgaactgtagaacgg

SEQ ID NO: 8197 - DNA, 35 bp, Artificial Sequence
  Synthetic oligonucleotide
agtgcgccaacacacaacaacagtggcccccatca

SEQ ID NO: 8198 - DNA, 38 bp, Artificial Sequence
  Synthetic oligonucleotide
gacactgtcagctcgtgcgtatctttctctttcgttga

SEQ ID NO: 8199 - DNA, 38 bp, Artificial Sequence
  Synthetic oligonucleotide
gacgacgagcagaatgcgcacacgcagcaccctgctga

SEQ ID NO: 8200 - DNA, 36 bp, Artificial Sequence
  Synthetic oligonucleotide
gccgcaccaaccaacagtaacgtcacattgctgaca

SEQ ID NO: 8201 - DNA, 38 bp, Artificial Sequence
  Synthetic oligonucleotide
gctgaaccagagccgattccgtttgagtcatgccgtga

SEQ ID NO: 8202 - DNA, 38 bp, Artificial Sequence
  Synthetic oligonucleotide
gtgagccgccgagaggttgatacgacagagactgttga

SEQ ID NO: 8203 - DNA, 35 bp, Artificial Sequence
  Synthetic oligonucleotide
gtgcgcacgcagtaaaaaaacgatgacagctcatc

SEQ ID NO: 8204 - DNA, 35 bp, Artificial Sequence
  Synthetic oligonucleotide
gtggtgccggagtgtattttgatacaatgatggtt

SEQ ID NO: 8205 - DNA, 35 bp, Artificial Sequence
  Synthetic oligonucleotide
tcacggaggagcgaggtaaacgtgagtgtcgatgg

SEQ ID NO: 8206 - DNA, 36 bp, Artificial Sequence
  Synthetic oligonucleotide
tccaaagcacgcctcgaattccttgggaccacggaa

SEQ ID NO: 8207 - DNA, 37 bp, Artificial Sequence
  Synthetic oligonucleotide
tccaacatccgaggcaaaaggagtatccgacgggtga

SEQ ID NO: 8208 - DNA, 36 bp, Artificial Sequence
  Synthetic oligonucleotide
tccaccgcacactggggtacatccgcctataccgta

SEQ ID NO: 8209 - DNA, 35 bp, Artificial Sequence
  Synthetic oligonucleotide
tccgaccgggcaggcatcggtatattaccaaatgt

SEQ ID NO: 8210 - DNA, 36 bp, Artificial Sequence
  Synthetic oligonucleotide
tgaccacgccggaactattgtataacgtgatgagga

SEQ ID NO: 8211 - DNA, 38 bp, Artificial Sequence
  Synthetic oligonucleotide
tgactagcggcattccctcaacatggccgtccctttga

SEQ ID NO: 8212 - DNA, 36 bp, Artificial Sequence
  Synthetic oligonucleotide
tgagccgacctcattagaccatgtgaaatgaggaga

SEQ ID NO: 8213 - DNA, 38 bp, Artificial Sequence
  Synthetic oligonucleotide
tgagccggcctcaacgctgtcgtaccgttcttgcttga

SEQ ID NO: 8214 - DNA, 35 bp, Artificial Sequence
  Synthetic oligonucleotide
tgccaaactgtagagtttggtcctggtggcagtaa

SEQ ID NO: 8215 - DNA, 37 bp, Artificial Sequence
  Synthetic oligonucleotide
aaacaccgcacacagagggcaagcctgaagtccggga

SEQ ID NO: 8216 - DNA, 35 bp, Artificial Sequence
  Synthetic oligonucleotide
aacgacgcgccataaattgcaaaagtgcatataag

SEQ ID NO: 8217 - DNA, 36 bp, Artificial Sequence
  Synthetic oligonucleotide
acgcgaccaatcactcgcctacaacgacctattaaa

SEQ ID NO: 8218 - DNA, 35 bp, Artificial Sequence
  Synthetic oligonucleotide
actgctgcccaccctgcgctctgtgaacaggcctc

SEQ ID NO: 8219 - DNA, 35 bp, Artificial Sequence
  Synthetic oligonucleotide
agacactgcgcggaccctgacaattaggtgctata

SEQ ID NO: 8220 - DNA, 36 bp, Artificial Sequence
  Synthetic oligonucleotide
agcaacaaagcagtccagcccagtcacccttgcgaa

SEQ ID NO: 8221 - DNA, 36 bp, Artificial Sequence
  Synthetic oligonucleotide
agcacgcccagctgcgaaacgagaatcaagtacgta

SEQ ID NO: 8222 - DNA, 37 bp, Artificial Sequence
  Synthetic oligonucleotide
atccacgccaacacgatcaaacaccccagtctcctga

SEQ ID NO: 8223 - DNA, 35 bp, Artificial Sequence
  Synthetic oligonucleotide
caatacacaggaggtaacgaggcgattgacgcacg

SEQ ID NO: 8224 - DNA, 37 bp, Artificial Sequence
  Synthetic oligonucleotide
gaacgcacatcgcatggagaagtccagagttcactga

SEQ ID NO: 8225 - DNA, 38 bp, Artificial Sequence
  Synthetic oligonucleotide
gaactgccggacgttgattaatcgtgccttattgttga

SEQ ID NO: 8226 - DNA, 36 bp, Artificial Sequence
  Synthetic oligonucleotide
gacgatgctcactctcgaaaaatagtctgattcgca

SEQ ID NO: 8227 - DNA, 36 bp, Artificial Sequence
  Synthetic oligonucleotide
gacgcagtccggacgtacgtgcgagacttaaagtga

SEQ ID NO: 8228 - DNA, 36 bp, Artificial Sequence
  Synthetic oligonucleotide
gcaccaccgtcggacctatgttgttcgcccttttca

SEQ ID NO: 8229 - DNA, 32 bp, Artificial Sequence
  Synthetic oligonucleotide
gcaccactgaccccgattcgactttacgctca

SEQ ID NO: 8230 - DNA, 36 bp, Artificial Sequence
  Synthetic oligonucleotide
gcatggctcacttctccagacctgtgtctcttacca

SEQ ID NO: 8231 - DNA, 36 bp, Artificial Sequence
  Synthetic oligonucleotide
gcgcactgaccccgtttttggactcacttggagtaa

SEQ ID NO: 8232 - DNA, 36 bp, Artificial Sequence
  Synthetic oligonucleotide
gtacaacgccacactcgcgtattacatgatttgcga

SEQ ID NO: 8233 - DNA, 36 bp, Artificial Sequence
  Synthetic oligonucleotide
gtcaacacaggaagcgttctcagatacttgcctgta

SEQ ID NO: 8234 - DNA, 38 bp, Artificial Sequence
  Synthetic oligonucleotide
gtgcgctgcaacgctgtaccgtagcttcccctacatga

SEQ ID NO: 8235 - DNA, 36 bp, Artificial Sequence
  Synthetic oligonucleotide
gtgtagccgcacacaaccagcttgaggcattctgaa

SEQ ID NO: 8236 - DNA, 35 bp, Artificial Sequence
  Synthetic oligonucleotide
gttcacgcccagtgttaggacgattcagtaggaat

SEQ ID NO: 8237 - DNA, 35 bp, Artificial Sequence
  Synthetic oligonucleotide
tacgcacccctcatgctggcaacaccctaacatcc

SEQ ID NO: 8238 - DNA, 37 bp, Artificial Sequence
  Synthetic oligonucleotide
tgagcgcaacacctgtagcgaagtcgtttcacagcga

SEQ ID NO: 8239 - DNA, 35 bp, Artificial Sequence
  Synthetic oligonucleotide
tgccccgcaagtgcaccacccaactccaactaacc

SEQ ID NO: 8240 - DNA, 36 bp, Artificial Sequence
  Synthetic oligonucleotide
aaccgaccccgcaagtctccccgtgtcgtcatgtga

SEQ ID NO: 8241 - DNA, 36 bp, Artificial Sequence
  Synthetic oligonucleotide
agcgagagcacagtggcgctactgtcaattcaagga

SEQ ID NO: 8242 - DNA, 38 bp, Artificial Sequence
  Synthetic oligonucleotide
atcgagcacgatgagggtgtggtaagcgttatgcgtga

SEQ ID NO: 8243 - DNA, 36 bp, Artificial Sequence
  Synthetic oligonucleotide
atgccggcgaagtagtacagcaggcaacttcactta

SEQ ID NO: 8244 - DNA, 36 bp, Artificial Sequence
  Synthetic oligonucleotide
caaggcaaccctcgtcgagcggttcgtggtgcctta

SEQ ID NO: 8245 - DNA, 36 bp, Artificial Sequence
  Synthetic oligonucleotide
ccgaccgacggctttctgcacacgtgattaaacaca

SEQ ID NO: 8246 - DNA, 35 bp, Artificial Sequence
  Synthetic oligonucleotide
gacacacaccgtcctatttgtcacgctcttacctg

SEQ ID NO: 8247 - DNA, 37 bp, Artificial Sequence
  Synthetic oligonucleotide
gaccaatgcaggcggatgacattgggaggaacggtga

SEQ ID NO: 8248 - DNA, 35 bp, Artificial Sequence
  Synthetic oligonucleotide
gacgcacaatcacacgactacggcacagattacgt

SEQ ID NO: 8249 - DNA, 38 bp, Artificial Sequence
  Synthetic oligonucleotide
gacgcaggaagggagtgagtagaggttcgcgttcatga

SEQ ID NO: 8250 - DNA, 35 bp, Artificial Sequence
  Synthetic oligonucleotide
gagacccaaccagaggattggcggatggacgaatg

SEQ ID NO: 8251 - DNA, 34 bp, Artificial Sequence
  Synthetic oligonucleotide
gatacctcagccgctatccattcatgtcgcacac

SEQ ID NO: 8252 - DNA, 37 bp, Artificial Sequence
  Synthetic oligonucleotide
gcgacgggtagctgttagcctcattcttattggtgga

SEQ ID NO: 8253 - DNA, 35 bp, Artificial Sequence
  Synthetic oligonucleotide
gtggaacgcgtacgatgccttgaactccacttcct

SEQ ID NO: 8254 - DNA, 37 bp, Artificial Sequence
  Synthetic oligonucleotide
tacgcccaccaagacataatcatctcaccgatgtaga

SEQ ID NO: 8255 - DNA, 36 bp, Artificial Sequence
  Synthetic oligonucleotide
tgacgaagtagcgaggtcgaggaacatggccgtaga

SEQ ID NO: 8256 - DNA, 35 bp, Artificial Sequence
  Synthetic oligonucleotide
tgagcgaatctgagtggcgggaaagagggcatggg

SEQ ID NO: 8257 - DNA, 36 bp, Artificial Sequence
  Synthetic oligonucleotide
ttggacgcaagtggcgggaaagtcgtctcgttcgca

SEQ ID NO: 8258 - DNA, 36 bp, Artificial Sequence
  Synthetic oligonucleotide
aacacaacggggcccgaagcgtactcagcacacgca

SEQ ID NO: 8259 - DNA, 35 bp, Artificial Sequence
  Synthetic oligonucleotide
aacccaaccccgactccttcgacccagtccagtac

SEQ ID NO: 8260 - DNA, 35 bp, Artificial Sequence
  Synthetic oligonucleotide
acacgccgggagcgtggacggtaaaaagggacttg

SEQ ID NO: 8261 - DNA, 38 bp, Artificial Sequence
  Synthetic oligonucleotide
acatgccggcctcccgtcgattgtatcagtgaccctaa

SEQ ID NO: 8262 - DNA, 36 bp, Artificial Sequence
  Synthetic oligonucleotide
accccgcaacaacgccgccccaatctcgaagaggta

SEQ ID NO: 8263 - DNA, 37 bp, Artificial Sequence
  Synthetic oligonucleotide
gacatgcaggagaggcttagcgataggtcctggatga

SEQ ID NO: 8264 - DNA, 38 bp, Artificial Sequence
  Synthetic oligonucleotide
gaccgagcgagtcacaggggacatatccacgcaaatga

SEQ ID NO: 8265 - DNA, 35 bp, Artificial Sequence
  Synthetic oligonucleotide
gctgacaaagcgcgagagtagtagaagttcgtttg

SEQ ID NO: 8266 - DNA, 36 bp, Artificial Sequence
  Synthetic oligonucleotide
taggcccactctgcatgtcgtatgtcaccaacctaa

SEQ ID NO: 8267 - DNA, 38 bp, Artificial Sequence
  Synthetic oligonucleotide
tcaatgcgcaagtgttggacgaggtttggggaacatga

SEQ ID NO: 8268 - DNA, 35 bp, Artificial Sequence
  Synthetic oligonucleotide
ttgaccaccaccgatctgacgattcgccgggtatc

SEQ ID NO: 8269 - DNA, 37 bp, Artificial Sequence
  Synthetic oligonucleotide
aacaaccgccagatactgaatccctcgcgtacactga

SEQ ID NO: 8270 - DNA, 38 bp, Artificial Sequence
  Synthetic oligonucleotide
aacgaccaccgagtcagcttgaaccctggaacccgtga

SEQ ID NO: 8271 - DNA, 37 bp, Artificial Sequence
  Synthetic oligonucleotide
acccacgtacagagacgaatgggaaaccgtccattga

SEQ ID NO: 8272 - DNA, 36 bp, Artificial Sequence
  Synthetic oligonucleotide
gacacacgcactcgatcttttacctctgatgtgaca

SEQ ID NO: 8273 - DNA, 35 bp, Artificial Sequence
  Synthetic oligonucleotide
gacacgtacagtaagcgatagatgaagccgcgatg

SEQ ID NO: 8274 - DNA, 35 bp, Artificial Sequence
  Synthetic oligonucleotide
gaccacaccaaacgtatgacggggccatcttagca

SEQ ID NO: 8275 - DNA, 35 bp, Artificial Sequence
  Synthetic oligonucleotide
gacgcacccgttcctaggccaggaatcgtaccatc

SEQ ID NO: 8276 - DNA, 36 bp, Artificial Sequence
  Synthetic oligonucleotide
gacgctacatctaagatatactgaccccgcgaaaaa

SEQ ID NO: 8277 - DNA, 38 bp, Artificial Sequence
  Synthetic oligonucleotide
gagccctccgaccctttagtgcgtgaagggttcactga

SEQ ID NO: 8278 - DNA, 36 bp, Artificial Sequence
  Synthetic oligonucleotide
gatcgcacgatggcactacactacctcggtctccca

SEQ ID NO: 8279 - DNA, 38 bp, Artificial Sequence
  Synthetic oligonucleotide
gccaacgtggtaggaaagcatatcgggctgggagctga

SEQ ID NO: 8280 - DNA, 36 bp, Artificial Sequence
  Synthetic oligonucleotide
gccacgcaaaaagctgaacgttactgaatgataaca

SEQ ID NO: 8281 - DNA, 37 bp, Artificial Sequence
  Synthetic oligonucleotide
gcccaacgccacacattcatagatacgttcactcgga

SEQ ID NO: 8282 - DNA, 35 bp, Artificial Sequence
  Synthetic oligonucleotide
gctgtcgtccgggctcaaccgttctatggatagta

SEQ ID NO: 8283 - DNA, 36 bp, Artificial Sequence
  Synthetic oligonucleotide
gtgtgcacgtgctgcgatttgcttactttgcccaca

SEQ ID NO: 8284 - DNA, 34 bp, Artificial Sequence
  Synthetic oligonucleotide
tgactgccccagcatctgactacccacttatttg

SEQ ID NO: 8285 - DNA, 38 bp, Artificial Sequence
  Synthetic oligonucleotide
tgccacagaatggtagtagcattcgatttaaaacgtga

SEQ ID NO: 8286 - DNA, 35 bp, Artificial Sequence
  Synthetic oligonucleotide
acacgatgtccagtgcgaaaagtaaagggtctagt

SEQ ID NO: 8287 - DNA, 38 bp, Artificial Sequence
  Synthetic oligonucleotide
acgcaacgcagcagccccaccgaccgtctatcgcatga

SEQ ID NO: 8288 - DNA, 38 bp, Artificial Sequence
  Synthetic oligonucleotide
atcacccagtggagcccacatacaacacgcttagctga

SEQ ID NO: 8289 - DNA, 38 bp, Artificial Sequence
  Synthetic oligonucleotide
atccgccacgagcatgtgcttcggtcacttgggagtga

SEQ ID NO: 8290 - DNA, 35 bp, Artificial Sequence
  Synthetic oligonucleotide
atgcaagccggacacacaggacatatggacgcatg

SEQ ID NO: 8291 - DNA, 37 bp, Artificial Sequence
  Synthetic oligonucleotide
gagtcgacgcaccggacggtatacgatggaaggagga

SEQ ID NO: 8292 - DNA, 36 bp, Artificial Sequence
  Synthetic oligonucleotide
gccaccgtgcaatgtcgccctgacgtcatcttataa

SEQ ID NO: 8293 - DNA, 36 bp, Artificial Sequence
  Synthetic oligonucleotide
gcctgctgcggggccgatccaacatttacatccaca

SEQ ID NO: 8294 - DNA, 35 bp, Artificial Sequence
  Synthetic oligonucleotide
ggaaccacatagagtcgtaagatgagcacggtaag

SEQ ID NO: 8295 - DNA, 35 bp, Artificial Sequence
  Synthetic oligonucleotide
ggaacctgctgcaggttaagaagtagacacgtcaa

SEQ ID NO: 8296 - DNA, 37 bp, Artificial Sequence
  Synthetic oligonucleotide
ggacaaaccaagcgtatatgtacaggcgtctccgtga

SEQ ID NO: 8297 - DNA, 36 bp, Artificial Sequence
  Synthetic oligonucleotide
ggaggcgctgccgacacgtattccaacggtgaagaa

SEQ ID NO: 8298 - DNA, 34 bp, Artificial Sequence
  Synthetic oligonucleotide
gttgagcagtgcccattatgctccgttggtacaa

SEQ ID NO: 8299 - DNA, 38 bp, Artificial Sequence
  Synthetic oligonucleotide
tatgcacccagaggcgtatctaatatcccacgaattga

SEQ ID NO: 8300 - DNA, 35 bp, Artificial Sequence
  Synthetic oligonucleotide
tcagaggcgccggccgaagaacgtcgttgtcgaaa

SEQ ID NO: 8301 - DNA, 37 bp, Artificial Sequence
  Synthetic oligonucleotide
tcagccacaccactgtctcacgtatccatcactatga

SEQ ID NO: 8302 - DNA, 35 bp, Artificial Sequence
  Synthetic oligonucleotide
tgacaccggctagttgttgggacatcaagacaagg

SEQ ID NO: 8303 - DNA, 38 bp, Artificial Sequence
  Synthetic oligonucleotide
gaaccgccatgacgttgataaaaggcggtcacgagtga

SEQ ID NO: 8304 - DNA, 37 bp, Artificial Sequence
  Synthetic oligonucleotide
gacgacgaggacgtacgatgggataccggaatcgaga

SEQ ID NO: 8305 - DNA, 38 bp, Artificial Sequence
  Synthetic oligonucleotide
gacgcagtatgtcaggtcgtttcgagttcaggtattga

SEQ ID NO: 8306 - DNA, 35 bp, Artificial Sequence
  Synthetic oligonucleotide
gactgcaccaccaccatatgcggcaaacctacgca

SEQ ID NO: 8307 - DNA, 35 bp, Artificial Sequence
  Synthetic oligonucleotide
gagggtagccatcatgaagcattagaacaccttgc

SEQ ID NO: 8308 - DNA, 35 bp, Artificial Sequence
  Synthetic oligonucleotide
gcctgggggcaagaaaactctcgttaaaggtgggc

SEQ ID NO: 8309 - DNA, 35 bp, Artificial Sequence
  Synthetic oligonucleotide
gtagccggcgccacaattactctaggcagtcaccg

SEQ ID NO: 8310 - DNA, 38 bp, Artificial Sequence
  Synthetic oligonucleotide
tctgacggcaagatgggactatcgacagaaggtattga

SEQ ID NO: 8311 - DNA, 36 bp, Artificial Sequence
  Synthetic oligonucleotide
tgatcacctgctcagtcacctctgctccctatgaca

SEQ ID NO: 8312 - DNA, 38 bp, Artificial Sequence
  Synthetic oligonucleotide
tgtgcaacggaaacactgattctgggctcgaggactga

SEQ ID NO: 8313 - DNA, 37 bp, Artificial Sequence
  Synthetic oligonucleotide
ttgtgctgcaggagatgcaacgtggagttggtgggga

SEQ ID NO: 8314 - DNA, 38 bp, Artificial Sequence
  Synthetic oligonucleotide
aacaccgtacaccactcgctataacgttgtcccactga

SEQ ID NO: 8315 - DNA, 35 bp, Artificial Sequence
  Synthetic oligonucleotide
acacaccccagatgcgtccggagaatgttgcgtca

SEQ ID NO: 8316 - DNA, 35 bp, Artificial Sequence
  Synthetic oligonucleotide
acacccacacttcgtcttaagagccgtcatgcttc

SEQ ID NO: 8317 - DNA, 37 bp, Artificial Sequence
  Synthetic oligonucleotide
acagcccacacgttactctccagcctcaatgagagga

SEQ ID NO: 8318 - DNA, 38 bp, Artificial Sequence
  Synthetic oligonucleotide
accacccactgctaaacagttgcctgacactcggatga

SEQ ID NO: 8319 - DNA, 36 bp, Artificial Sequence
  Synthetic oligonucleotide
atcccaataacagcatcatgccacgagccatcccaa

SEQ ID NO: 8320 - DNA, 38 bp, Artificial Sequence
  Synthetic oligonucleotide
attgccggggtcagtggtatagccgagtgtgatggtga

SEQ ID NO: 8321 - DNA, 35 bp, Artificial Sequence
  Synthetic oligonucleotide
gaacccacggagcagactcggccctacccccaatt

SEQ ID NO: 8322 - DNA, 37 bp, Artificial Sequence
  Synthetic oligonucleotide
gacgcgtgtcagctgatcacggcgtaaagtctgtgga

SEQ ID NO: 8323 - DNA, 38 bp, Artificial Sequence
  Synthetic oligonucleotide
gcacagagccgtagtctgcgctagtttccacgtcttga

SEQ ID NO: 8324 - DNA, 37 bp, Artificial Sequence
  Synthetic oligonucleotide
gccccgacgaactcgacccccacaatcacgcaactga

SEQ ID NO: 8325 - DNA, 35 bp, Artificial Sequence
  Synthetic oligonucleotide
gccggagcaacagaagctaacgacaagcgcaggca

SEQ ID NO: 8326 - DNA, 35 bp, Artificial Sequence
  Synthetic oligonucleotide
gcgaaaccccgcacagccagtacatacccctgacc

SEQ ID NO: 8327 - DNA, 36 bp, Artificial Sequence
  Synthetic oligonucleotide
gctgaccatcgtacactctaactgtcactcgaaata

SEQ ID NO: 8328 - DNA, 37 bp, Artificial Sequence
  Synthetic oligonucleotide
gtgcaacgtgccgcaggtgtgctccaggacgaggaga

SEQ ID NO: 8329 - DNA, 36 bp, Artificial Sequence
  Synthetic oligonucleotide
taaccgccaggtacagccttgtacaactacttcgca

SEQ ID NO: 8330 - DNA, 36 bp, Artificial Sequence
  Synthetic oligonucleotide
taacgcagggcaacaccgctaagatctgtagtctta

SEQ ID NO: 8331 - DNA, 38 bp, Artificial Sequence
  Synthetic oligonucleotide
taccaacagcagggcggtaatacgagttctgtccctga

SEQ ID NO: 8332 - DNA, 35 bp, Artificial Sequence
  Synthetic oligonucleotide
tcacgacccggcatgtgtgtaccctgttggtcacg

SEQ ID NO: 8333 - DNA, 37 bp, Artificial Sequence
  Synthetic oligonucleotide
tccacacggtcagagctaaactgatcagttgatgcga

SEQ ID NO: 8334 - DNA, 37 bp, Artificial Sequence
  Synthetic oligonucleotide
tccccccgcacctataattatgaccccgacctgccga

SEQ ID NO: 8335 - DNA, 38 bp, Artificial Sequence
  Synthetic oligonucleotide
tgatgccccgagctggctgttgaagatccaaggggtga

SEQ ID NO: 8336 - DNA, 35 bp, Artificial Sequence
  Synthetic oligonucleotide
ttgacgcccaccgcataaggggtcaaccgacatcc

SEQ ID NO: 8337 - DNA, 35 bp, Artificial Sequence
  Synthetic oligonucleotide
aaacacgagtagcacacagactcactgaccccgcc

SEQ ID NO: 8338 - DNA, 35 bp, Artificial Sequence
  Synthetic oligonucleotide
acaccaactgcagcagtgcattagccattactacg

SEQ ID NO: 8339 - DNA, 36 bp, Artificial Sequence
  Synthetic oligonucleotide
acatagcggggtagagaggccggggttgggttatga

SEQ ID NO: 8340 - DNA, 35 bp, Artificial Sequence
  Synthetic oligonucleotide
accagcaagcacacgacactccacgctaccgccca

SEQ ID NO: 8341 - DNA, 35 bp, Artificial Sequence
  Synthetic oligonucleotide
atggaccgagctagtccccgtcacgatagaacatg

SEQ ID NO: 8342 - DNA, 37 bp, Artificial Sequence
  Synthetic oligonucleotide
gacaaccattgtgagatatcggttgcagtgacgcgga

SEQ ID NO: 8343 - DNA, 37 bp, Artificial Sequence
  Synthetic oligonucleotide
gacacgacacacggaatgtagctcttttgatgtatga

SEQ ID NO: 8344 - DNA, 38 bp, Artificial Sequence
  Synthetic oligonucleotide
gacgggtgggcggggggccatgtcatagtatcggatga

SEQ ID NO: 8345 - DNA, 37 bp, Artificial Sequence
  Synthetic oligonucleotide
gactgccagcagtcgaacgttgggacgtatctgatga

SEQ ID NO: 8346 - DNA, 35 bp, Artificial Sequence
  Synthetic oligonucleotide
gactggtcggaaactgtgtgagtgcgccgttgtac

SEQ ID NO: 8347 - DNA, 37 bp, Artificial Sequence
  Synthetic oligonucleotide
gcaaccgcgcatggcaatgcgaagacaacgagagcga

SEQ ID NO: 8348 - DNA, 36 bp, Artificial Sequence
  Synthetic oligonucleotide
gccaaccgcaggaagaacgcagactagtgtcaagaa

SEQ ID NO: 8349 - DNA, 35 bp, Artificial Sequence
  Synthetic oligonucleotide
gctcacaggcaagtgcgaaggtccatcttgaaagc

SEQ ID NO: 8350 - DNA, 35 bp, Artificial Sequence
  Synthetic oligonucleotide
gggaccgcacgagcagactgttgttatgttctacc

SEQ ID NO: 8351 - DNA, 36 bp, Artificial Sequence
  Synthetic oligonucleotide
gtagtgcgccggccccaacacatactctcacgcgta

SEQ ID NO: 8352 - DNA, 37 bp, Artificial Sequence
  Synthetic oligonucleotide
tacgccacgcaatgccggttgacgtagagccgtacga

SEQ ID NO: 8353 - DNA, 36 bp, Artificial Sequence
  Synthetic oligonucleotide
tcacaacaagcagccacatgcatataacatttgtca

SEQ ID NO: 8354 - DNA, 37 bp, Artificial Sequence
  Synthetic oligonucleotide
tgagagcctaagacgggaaataatggagtcggtcgga

SEQ ID NO: 8355 - DNA, 35 bp, Artificial Sequence
  Synthetic oligonucleotide
tgccacgtggcagacctagcaacgatcacatcttc

SEQ ID NO: 8356 - DNA, 35 bp, Artificial Sequence
  Synthetic oligonucleotide
tgcgtccgaggtccgattatttagcaacatggagg

SEQ ID NO: 8357 - DNA, 35 bp, Artificial Sequence
  Synthetic oligonucleotide
aatgcgcaccccgattacccttatgttaccccgtc

SEQ ID NO: 8358 - DNA, 37 bp, Artificial Sequence
  Synthetic oligonucleotide
acacccgcacaggaaggtatagtaccagcgcgtaaga

SEQ ID NO: 8359 - DNA, 37 bp, Artificial Sequence
  Synthetic oligonucleotide
acatcacgcatcttggcgggactacgaccatacttga

SEQ ID NO: 8360 - DNA, 38 bp, Artificial Sequence
  Synthetic oligonucleotide
agctgagccaggcccaaaaagagcgggtgcaagtttga

SEQ ID NO: 8361 - DNA, 37 bp, Artificial Sequence
  Synthetic oligonucleotide
gacacaccgcagcatgtgatcgagttcatccgtatga

SEQ ID NO: 8362 - DNA, 38 bp, Artificial Sequence
  Synthetic oligonucleotide
gacatcaggccaagcttttagcaatcaaccccagttga

SEQ ID NO: 8363 - DNA, 37 bp, Artificial Sequence
  Synthetic oligonucleotide
gaccaaacgtgagggacgatactacccttcagttgga

SEQ ID NO: 8364 - DNA, 36 bp, Artificial Sequence
  Synthetic oligonucleotide
gagaccgcattccggttgtccatatagtggaacgta

SEQ ID NO: 8365 - DNA, 36 bp, Artificial Sequence
  Synthetic oligonucleotide
gatgccgcaaggaaggtgtggattttgttccccata

SEQ ID NO: 8366 - DNA, 37 bp, Artificial Sequence
  Synthetic oligonucleotide
gatggacgaatgtactgtcaatagatgatggttagga

SEQ ID NO: 8367 - DNA, 36 bp, Artificial Sequence
  Synthetic oligonucleotide
gcacaggtccgtatgaaggcttcccactacattgta

SEQ ID NO: 8368 - DNA, 36 bp, Artificial Sequence
  Synthetic oligonucleotide
gccaactcaggagtgttacgtgatgatgataagcaa

SEQ ID NO: 8369 - DNA, 37 bp, Artificial Sequence
  Synthetic oligonucleotide
gcccagtcccgtcgtcccaacgacaagcttacgtaga

SEQ ID NO: 8370 - DNA, 37 bp, Artificial Sequence
  Synthetic oligonucleotide
gcctgccactaaaggccgaattcgagctaagttggga

SEQ ID NO: 8371 - DNA, 35 bp, Artificial Sequence
  Synthetic oligonucleotide
ggacacatcccatacataccaacagtccgttcgtc

SEQ ID NO: 8372 - DNA, 36 bp, Artificial Sequence
  Synthetic oligonucleotide
gtcacgtgcgcaaatgtacacaataccctcatctca

SEQ ID NO: 8373 - DNA, 35 bp, Artificial Sequence
  Synthetic oligonucleotide
gtgcgggaggtgcaatacgtctttgtcgcacacag

SEQ ID NO: 8374 - DNA, 37 bp, Artificial Sequence
  Synthetic oligonucleotide
tactgaccccgcttaaattgtataagacgaagacgga

SEQ ID NO: 8375 - DNA, 36 bp, Artificial Sequence
  Synthetic oligonucleotide
tcaacacacaggcacgcgtatcttcgcccacgatta

SEQ ID NO: 8376 - DNA, 36 bp, Artificial Sequence
  Synthetic oligonucleotide
tggtgggctcatcgcggtcccaacccagttcccaaa

SEQ ID NO: 8377 - DNA, 35 bp, Artificial Sequence
  Synthetic oligonucleotide
aacaaccgcacgccctcaagagtaacaagacaaag

SEQ ID NO: 8378 - DNA, 36 bp, Artificial Sequence
  Synthetic oligonucleotide
aacgcaaccatgttgtactccacgtgccgactagaa

SEQ ID NO: 8379 - DNA, 35 bp, Artificial Sequence
  Synthetic oligonucleotide
acacaccccggtcgttgtcatacgccgcgctagcg

SEQ ID NO: 8380 - DNA, 38 bp, Artificial Sequence
  Synthetic oligonucleotide
atgcccgaacgaacgggaataggttgcatgttatctga

SEQ ID NO: 8381 - DNA, 35 bp, Artificial Sequence
  Synthetic oligonucleotide
gaaaacacgcccaagctctagcagtaaggccccga

SEQ ID NO: 8382 - DNA, 36 bp, Artificial Sequence
  Synthetic oligonucleotide
gacatcgcagttagtctgtgcattacccgcataaca

SEQ ID NO: 8383 - DNA, 38 bp, Artificial Sequence
  Synthetic oligonucleotide
gacccgatccagtttccgcaatggatcctctttgatga

SEQ ID NO: 8384 - DNA, 36 bp, Artificial Sequence
  Synthetic oligonucleotide
gaccgaggaggcggtgggtaagaatctgtttggaca

SEQ ID NO: 8385 - DNA, 37 bp, Artificial Sequence
  Synthetic oligonucleotide
gacgacgttgtgcactactaccctatccaaatttcga

SEQ ID NO: 8386 - DNA, 38 bp, Artificial Sequence
  Synthetic oligonucleotide
gatgcgcaaaacagtggacaggaggaactttatagtga

SEQ ID NO: 8387 - DNA, 38 bp, Artificial Sequence
  Synthetic oligonucleotide
gctcaacccaagtgataaaggacccgaagtgaccgtga

SEQ ID NO: 8388 - DNA, 37 bp, Artificial Sequence
  Synthetic oligonucleotide
gctgggaagccggtgcaaaaagaggccacagattaga

SEQ ID NO: 8389 - DNA, 36 bp, Artificial Sequence
  Synthetic oligonucleotide
gtgccacacatccacgctcaatagggacagccgata

SEQ ID NO: 8390 - DNA, 38 bp, Artificial Sequence
  Synthetic oligonucleotide
tcacgcgcaatgtcacccccaaacagtctcacgggtga

SEQ ID NO: 8391 - DNA, 35 bp, Artificial Sequence
  Synthetic oligonucleotide
tgacaccgaatgcagttaacagcaattccctagtg

SEQ ID NO: 8392 - DNA, 35 bp, Artificial Sequence
  Synthetic oligonucleotide
tgcatgagcgccgttaatccatcatctcacccccc

SEQ ID NO: 8393 - DNA, 35 bp, Artificial Sequence
  Synthetic oligonucleotide
tgtagcgcaagacccccagacagtccacgcggaga

SEQ ID NO: 8394 - DNA, 36 bp, Artificial Sequence
  Synthetic oligonucleotide
ttgacgcaacgctgaccaaaatatcccatcgtctca

SEQ ID NO: 8395 - DNA, 35 bp, Artificial Sequence
  Synthetic oligonucleotide
ttgtgcaccaccatagtctggtacatgctctgtag

SEQ ID NO: 8396 - DNA, 37 bp, Artificial Sequence
  Synthetic oligonucleotide
aacacgcttggtcgccactccttatcctccccgttga

SEQ ID NO: 8397 - DNA, 35 bp, Artificial Sequence
  Synthetic oligonucleotide
aacgcagtccccagtctgccacattaccgcttctc

SEQ ID NO: 8398 - DNA, 35 bp, Artificial Sequence
  Synthetic oligonucleotide
acacccccaggtgtcccaaaagtagtgccttaatg

SEQ ID NO: 8399 - DNA, 37 bp, Artificial Sequence
  Synthetic oligonucleotide
acagccgagagctctggagttaaatgggatagtaaga

SEQ ID NO: 8400 - DNA, 37 bp, Artificial Sequence
  Synthetic oligonucleotide
accgacacgtccttgcccctttaggacactcataaga

SEQ ID NO: 8401 - DNA, 35 bp, Artificial Sequence
  Synthetic oligonucleotide
accgactccactatcgcctaccgaccccgtgcccc

SEQ ID NO: 8402 - DNA, 36 bp, Artificial Sequence
  Synthetic oligonucleotide
actcacgcgacgccgtgaaccaggctgactgttcta

SEQ ID NO: 8403 - DNA, 38 bp, Artificial Sequence
  Synthetic oligonucleotide
agaccggtggtcggagtactgagcggtttagaaattga

SEQ ID NO: 8404 - DNA, 36 bp, Artificial Sequence
  Synthetic oligonucleotide
cacacgtgccacgacggatcgttcagtgggatttca

SEQ ID NO: 8405 - DNA, 37 bp, Artificial Sequence
  Synthetic oligonucleotide
gacaacacccgtccatgtacttaatatgcgacgacga

SEQ ID NO: 8406 - DNA, 36 bp, Artificial Sequence
  Synthetic oligonucleotide
gacaaccgcgctgttgtcgctagttccgttacgaga

SEQ ID NO: 8407 - DNA, 38 bp, Artificial Sequence
  Synthetic oligonucleotide
gacacgagaaggcgaaggtcactcatttccgtaaatga

SEQ ID NO: 8408 - DNA, 35 bp, Artificial Sequence
  Synthetic oligonucleotide
gacatgtccggagctataggaactagtggatacgt

SEQ ID NO: 8409 - DNA, 38 bp, Artificial Sequence
  Synthetic oligonucleotide
gaccggaggccaatattatctctgtactacctcgttga

SEQ ID NO: 8410 - DNA, 35 bp, Artificial Sequence
  Synthetic oligonucleotide
gacgcaggcaagtcgcgtacgcgatgtaggagcca

SEQ ID NO: 8411 - DNA, 35 bp, Artificial Sequence
  Synthetic oligonucleotide
gacgcatgtccgtgctagtccatttctcccgatcc

SEQ ID NO: 8412 - DNA, 37 bp, Artificial Sequence
  Synthetic oligonucleotide
gacgccaagtcggtgttggacacgtaggccgaataga

SEQ ID NO: 8413 - DNA, 35 bp, Artificial Sequence
  Synthetic oligonucleotide
gacgccggatcaggatgtgatgataagcgaatgta

SEQ ID NO: 8414 - DNA, 37 bp, Artificial Sequence
  Synthetic oligonucleotide
gagcgggtagccagcttaggtcatcagtcgattttga

SEQ ID NO: 8415 - DNA, 36 bp, Artificial Sequence
  Synthetic oligonucleotide
gatgtcccagagcgcgattttcacagatcatgtgca

SEQ ID NO: 8416 - DNA, 35 bp, Artificial Sequence
  Synthetic oligonucleotide
gcaaccatcgctgctacacaatccgcccactcccg

SEQ ID NO: 8417 - DNA, 36 bp, Artificial Sequence
  Synthetic oligonucleotide
gcagagcacagctgcgatactgcgggtcatatggga

SEQ ID NO: 8418 - DNA, 36 bp, Artificial Sequence
  Synthetic oligonucleotide
gcccaaatcacgtccctggtatgcgtacgtcacata

SEQ ID NO: 8419 - DNA, 36 bp, Artificial Sequence
  Synthetic oligonucleotide
ggacgccgcgacaaaatggcgtccgcctcacaagga

SEQ ID NO: 8420 - DNA, 38 bp, Artificial Sequence
  Synthetic oligonucleotide
gtacgcgaaggtcgttgatacttccttgacacccctga

SEQ ID NO: 8421 - DNA, 36 bp, Artificial Sequence
  Synthetic oligonucleotide
gtcacaccaatgaatcatcaagctagcccactgtcg

SEQ ID NO: 8422 - DNA, 35 bp, Artificial Sequence
  Synthetic oligonucleotide
gtgaagccgcaatgtgacaatctgtctgtggacca

SEQ ID NO: 8423 - DNA, 36 bp, Artificial Sequence
  Synthetic oligonucleotide
gtgggctgacgagtgagactggggacggacaaagca

SEQ ID NO: 8424 - DNA, 35 bp, Artificial Sequence
  Synthetic oligonucleotide
tacaccaccgagctatctaattaccagtcggccca

SEQ ID NO: 8425 - DNA, 36 bp, Artificial Sequence
  Synthetic oligonucleotide
tatcgcaccgcaacacctcgatcactgcagtcgcct

SEQ ID NO: 8426 - DNA, 37 bp, Artificial Sequence
  Synthetic oligonucleotide
tcacacgacagactgtgtgcctatctctgtgcgtgga

SEQ ID NO: 8427 - DNA, 35 bp, Artificial Sequence
  Synthetic oligonucleotide
accaagcgagcgtagtgcgaacatgacgttgccac

SEQ ID NO: 8428 - DNA, 36 bp, Artificial Sequence
  Synthetic oligonucleotide
accacacccaccctatcaatttcgtcgcctagccga

SEQ ID NO: 8429 - DNA, 35 bp, Artificial Sequence
  Synthetic oligonucleotide
accaccccacaacgtgttcaattgtgcagtcctcg

SEQ ID NO: 8430 - DNA, 36 bp, Artificial Sequence
  Synthetic oligonucleotide
accgccacatccgagcgtatcgcaatccgtatagta

SEQ ID NO: 8431 - DNA, 35 bp, Artificial Sequence
  Synthetic oligonucleotide
acctcgccggtaaccgtctccggttgtcgtacccc

SEQ ID NO: 8432 - DNA, 36 bp, Artificial Sequence
  Synthetic oligonucleotide
actgcaacccgggataccgttatcaggctgttgaaa

SEQ ID NO: 8433 - DNA, 37 bp, Artificial Sequence
  Synthetic oligonucleotide
atcgcacgccgaaatagagagcgtcaactatgggcga

SEQ ID NO: 8434 - DNA, 36 bp, Artificial Sequence
  Synthetic oligonucleotide
gacactcaacagaattctacaacgtgtctggtacca

SEQ ID NO: 8435 - DNA, 35 bp, Artificial Sequence
  Synthetic oligonucleotide
gaccgcatcatcagccgtacccgtagtcataccct

SEQ ID NO: 8436 - DNA, 34 bp, Artificial Sequence
  Synthetic oligonucleotide
gacgcgcaggctatggagcgcataactgcctatt

SEQ ID NO: 8437 - DNA, 37 bp, Artificial Sequence
  Synthetic oligonucleotide
gcacgaaccccaactactgaccccgcctcgaaccgta

SEQ ID NO: 8438 - DNA, 35 bp, Artificial Sequence
  Synthetic oligonucleotide
gtcacaggccgcgaggcattgtcaatttttgccta

SEQ ID NO: 8439 - DNA, 35 bp, Artificial Sequence
  Synthetic oligonucleotide
gtcggagtgcgggttaacaatgtcagtattacgat

SEQ ID NO: 8440 - DNA, 38 bp, Artificial Sequence
  Synthetic oligonucleotide
tacacgccggagaactctaggtaggataacgttggtga

SEQ ID NO: 8441 - DNA, 35 bp, Artificial Sequence
  Synthetic oligonucleotide
tacgcgcagaatcgcctatattcatccgctgtccc

SEQ ID NO: 8442 - DNA, 36 bp, Artificial Sequence
  Synthetic oligonucleotide
tagtcacgggccggctaaagtgattgtaaagagata

SEQ ID NO: 8443 - DNA, 37 bp, Artificial Sequence
  Synthetic oligonucleotide
tccgagcccggggttagacacaacttggcttacaaga

SEQ ID NO: 8444 - DNA, 35 bp, Artificial Sequence
  Synthetic oligonucleotide
tgacgcacggatcaacatctgctcggaaccctacc

SEQ ID NO: 8445 - DNA, 35 bp, Artificial Sequence
  Synthetic oligonucleotide
tgcgaaccgtagtgacgcgcgagtatgacgtagct

SEQ ID NO: 8446 - DNA, 35 bp, Artificial Sequence
  Synthetic oligonucleotide
accgacgctagaaggactgcgggcacatcaatgga

SEQ ID NO: 8447 - DNA, 38 bp, Artificial Sequence
  Synthetic oligonucleotide
accgactgcaagtcgaggagcatgttatcagacgctga

SEQ ID NO: 8448 - DNA, 36 bp, Artificial Sequence
  Synthetic oligonucleotide
caacgacgcacctgtattttatgttaattcggtgta

SEQ ID NO: 8449 - DNA, 38 bp, Artificial Sequence
  Synthetic oligonucleotide
gacaccgcgcagacccacttacagtcagcaataactga

SEQ ID NO: 8450 - DNA, 34 bp, Artificial Sequence
  Synthetic oligonucleotide
gacggaccgaagtcatcttgtcgatgttacttta

SEQ ID NO: 8451 - DNA, 36 bp, Artificial Sequence
  Synthetic oligonucleotide
gatcgggtcgccaaaagtgtagatcttcagtcccaa

SEQ ID NO: 8452 - DNA, 37 bp, Artificial Sequence
  Synthetic oligonucleotide
gatggaccacgtgtcactcccattagcaatccaagga

SEQ ID NO: 8453 - DNA, 35 bp, Artificial Sequence
  Synthetic oligonucleotide
gcacaagctgccgaggcatcaaagttaagaggaga

SEQ ID NO: 8454 - DNA, 37 bp, Artificial Sequence
  Synthetic oligonucleotide
gccaacgtgaagcaccataaccccggtatcctgacga

SEQ ID NO: 8455 - DNA, 36 bp, Artificial Sequence
  Synthetic oligonucleotide
gctgatccgaccagcccgcatcttgaatcactatca

SEQ ID NO: 8456 - DNA, 35 bp, Artificial Sequence
  Synthetic oligonucleotide
ggacgtacgtgcgccaagccttttcaacctgccta

SEQ ID NO: 8457 - DNA, 37 bp, Artificial Sequence
  Synthetic oligonucleotide
taaacgcggggtgtccatgtccagcacaaccgtttga

SEQ ID NO: 8458 - DNA, 38 bp, Artificial Sequence
  Synthetic oligonucleotide
tcagtccggaagtgcactttgaccccagtcaaatctga

SEQ ID NO: 8459 - DNA, 36 bp, Artificial Sequence
  Synthetic oligonucleotide
tccgcaacaggatctctcaaacgccgaaatgttaaa

SEQ ID NO: 8460 - DNA, 36 bp, Artificial Sequence
  Synthetic oligonucleotide
tgcggacgagcaatggagagcgtttcttatcatcaa

SEQ ID NO: 8461 - DNA, 38 bp, Artificial Sequence
  Synthetic oligonucleotide
ttgacacggccctccacagtgtgtatcgccttgtgtga

SEQ ID NO: 8462 - DNA, 35 bp, Artificial Sequence
  Synthetic oligonucleotide
aaaccctctccaccccggcctgaccccgcacgagc

SEQ ID NO: 8463 - DNA, 36 bp, Artificial Sequence
  Synthetic oligonucleotide
aacgtgcgcacggttacgcctgatagtaatcttgga

SEQ ID NO: 8464 - DNA, 36 bp, Artificial Sequence
  Synthetic oligonucleotide
aactgcccccatcggcgatgtagattgcagagccta

SEQ ID NO: 8465 - DNA, 37 bp, Artificial Sequence
  Synthetic oligonucleotide
acaccatgcagactacggacgtcgtattggccatgga

SEQ ID NO: 8466 - DNA, 37 bp, Artificial Sequence
  Synthetic oligonucleotide
acaccgcgcactcagtctgtattcgatgtgagatcga

SEQ ID NO: 8467 - DNA, 36 bp, Artificial Sequence
  Synthetic oligonucleotide
acccagtcacaagcaggctgaatagagtggcgagca

SEQ ID NO: 8468 - DNA, 38 bp, Artificial Sequence
  Synthetic oligonucleotide
gaacatgcgccacatatgtccgtccactcttaccctga

SEQ ID NO: 8469 - DNA, 38 bp, Artificial Sequence
  Synthetic oligonucleotide
gaacccacagcctacgtactacgaaacatgtcgcttga

SEQ ID NO: 8470 - DNA, 37 bp, Artificial Sequence
  Synthetic oligonucleotide
gaatgccaccgaagggttattcatatccctctctcga

SEQ ID NO: 8471 - DNA, 35 bp, Artificial Sequence
  Synthetic oligonucleotide
gacaccgagaacagcgcatcgtgccagatctcctt

SEQ ID NO: 8472 - DNA, 35 bp, Artificial Sequence
  Synthetic oligonucleotide
gacgaggtcgtcgcagaacaacacttatcatgatt

SEQ ID NO: 8473 - DNA, 35 bp, Artificial Sequence
  Synthetic oligonucleotide
gacgcagtgacgtcaccgaaaagaggtaggttacg

SEQ ID NO: 8474 - DNA, 35 bp, Artificial Sequence
  Synthetic oligonucleotide
gagccagtccccgcatatcatcgttctacgccacg

SEQ ID NO: 8475 - DNA, 35 bp, Artificial Sequence
  Synthetic oligonucleotide
gagggctaccggccaaatggcttattatggagaag

SEQ ID NO: 8476 - DNA, 38 bp, Artificial Sequence
  Synthetic oligonucleotide
gatcgaccgtagaccatagtgtacagtacgtacggtga

SEQ ID NO: 8477 - DNA, 36 bp, Artificial Sequence
  Synthetic oligonucleotide
gatgccgtcgcagaatgttcctgcgagtgaagcgga

SEQ ID NO: 8478 - DNA, 35 bp, Artificial Sequence
  Synthetic oligonucleotide
gcaaacaccacactgaaatctaagactggcgcacg

SEQ ID NO: 8479 - DNA, 37 bp, Artificial Sequence
  Synthetic oligonucleotide
gcaacacaacggcgagatgcgatggactcccgactga

SEQ ID NO: 8480 - DNA, 35 bp, Artificial Sequence
  Synthetic oligonucleotide
gccagtgccaatagcctcacgtacgctcgatcttc

SEQ ID NO: 8481 - DNA, 36 bp, Artificial Sequence
  Synthetic oligonucleotide
gctcacccagggcaaagtattcgtatccccctggta

SEQ ID NO: 8482 - DNA, 35 bp, Artificial Sequence
  Synthetic oligonucleotide
ggaccccgcaaaatggcaatgagcatcgggttggg

SEQ ID NO: 8483 - DNA, 35 bp, Artificial Sequence
  Synthetic oligonucleotide
ggagggagctccaccgtgccaatgttaataggtac

SEQ ID NO: 8484 - DNA, 35 bp, Artificial Sequence
  Synthetic oligonucleotide
ggtggaggccagtgtaactctggaagacaaatggt

SEQ ID NO: 8485 - DNA, 38 bp, Artificial Sequence
  Synthetic oligonucleotide
gtacatgcgccgactacgctattagtgtacggttttga

SEQ ID NO: 8486 - DNA, 35 bp, Artificial Sequence
  Synthetic oligonucleotide
tacactgcctggcataattgaccccgtatccaacc

SEQ ID NO: 8487 - DNA, 37 bp, Artificial Sequence
  Synthetic oligonucleotide
tacgacggcgccacgcggtaggaatgaggacaggaga

SEQ ID NO: 8488 - DNA, 35 bp, Artificial Sequence
  Synthetic oligonucleotide
tacgtgcaggggggcctcggcaatcaaggacctct

SEQ ID NO: 8489 - DNA, 37 bp, Artificial Sequence
  Synthetic oligonucleotide
tccaacgccggaatgcgcagttaacgtctccgcacga

SEQ ID NO: 8490 - DNA, 37 bp, Artificial Sequence
  Synthetic oligonucleotide
tccgcaagagtcccgcgcgcaggattaaggctcctga

SEQ ID NO: 8491 - DNA, 38 bp, Artificial Sequence
  Synthetic oligonucleotide
tccgcctgccacgtaagcataaggaaactcgagcatga

SEQ ID NO: 8492 - DNA, 38 bp, Artificial Sequence
  Synthetic oligonucleotide
tgacgggcggaatgcgcgtcaacaactcatggaaatga

SEQ ID NO: 8493 - DNA, 38 bp, Artificial Sequence
  Synthetic oligonucleotide
tgcggtgacggtgcgaaagcgaatcgaatctgtactga

SEQ ID NO: 8494 - DNA, 37 bp, Artificial Sequence
  Synthetic oligonucleotide
acactgcgagggcacgagctgaggagtctagggtgga

SEQ ID NO: 8495 - DNA, 36 bp, Artificial Sequence
  Synthetic oligonucleotide
accaccgcaacatcccgatagtggacacgtctagca

SEQ ID NO: 8496 - DNA, 38 bp, Artificial Sequence
  Synthetic oligonucleotide
atgccagccgcagtacttcacgggatgctagacaatga

SEQ ID NO: 8497 - DNA, 35 bp, Artificial Sequence
  Synthetic oligonucleotide
atgcgggggccagggagtactatcggtgctgaaac

SEQ ID NO: 8498 - DNA, 38 bp, Artificial Sequence
  Synthetic oligonucleotide
gacacagtcggtcgagataaacgtcagcagtcctatga

SEQ ID NO: 8499 - DNA, 35 bp, Artificial Sequence
  Synthetic oligonucleotide
gacctgcccaacgactagatacttcatacaccgac

SEQ ID NO: 8500 - DNA, 35 bp, Artificial Sequence
  Synthetic oligonucleotide
gacgggggtggagtggactttagcctacgggagag

SEQ ID NO: 8501 - DNA, 36 bp, Artificial Sequence
  Synthetic oligonucleotide
gactgccacatatgtcaaactgagccatttaaatca

SEQ ID NO: 8502 - DNA, 37 bp, Artificial Sequence
  Synthetic oligonucleotide
gcaaacagacggatgcagtggggtaagggatggtgga

SEQ ID NO: 8503 - DNA, 36 bp, Artificial Sequence
  Synthetic oligonucleotide
gcatgaggtcggttgcatgcacatagtacttacgga

SEQ ID NO: 8504 - DNA, 37 bp, Artificial Sequence
  Synthetic oligonucleotide
gccacgtgcggtactagcggtcatgatccctgcccga

SEQ ID NO: 8505 - DNA, 36 bp, Artificial Sequence
  Synthetic oligonucleotide
gcccaagcaggtggacttgattttggaccttgaaaa

SEQ ID NO: 8506 - DNA, 35 bp, Artificial Sequence
  Synthetic oligonucleotide
gccgagaacagcaatctgagagtataatgtacgta

SEQ ID NO: 8507 - DNA, 36 bp, Artificial Sequence
  Synthetic oligonucleotide
ggacggtgccggccggataactccgcagtcttgaaa

SEQ ID NO: 8508 - DNA, 36 bp, Artificial Sequence
  Synthetic oligonucleotide
gtccgaacaagcacgatctgtactggcttgctttta

SEQ ID NO: 8509 - DNA, 38 bp, Artificial Sequence
  Synthetic oligonucleotide
gtcgagccggcttgaatgcagacatgcagacaatatga

SEQ ID NO: 8510 - DNA, 37 bp, Artificial Sequence
  Synthetic oligonucleotide
gtgcacgccaagtagggtgccagagcatcctggaaga

SEQ ID NO: 8511 - DNA, 35 bp, Artificial Sequence
  Synthetic oligonucleotide
tcacgcaactggggctttccttgtccgttcccaaa

SEQ ID NO: 8512 - DNA, 36 bp, Artificial Sequence
  Synthetic oligonucleotide
tcagtcggaaccgtgatacgaaggggctgaccgcta

SEQ ID NO: 8513 - DNA, 37 bp, Artificial Sequence
  Synthetic oligonucleotide
tgcgcccccagtgacgtaaggcaccattttcttgcga

SEQ ID NO: 8514 - DNA, 37 bp, Artificial Sequence
  Synthetic oligonucleotide
tgcgtgagcaacgggtgtcacacgtcgccttgagtga

SEQ ID NO: 8515 - DNA, 36 bp, Artificial Sequence
  Synthetic oligonucleotide
aacgacacagcagccatacaagtacgtgtgagggaa

SEQ ID NO: 8516 - DNA, 35 bp, Artificial Sequence
  Synthetic oligonucleotide
acagcccaagcgcacgttaaggtgtcgcgtatagg

SEQ ID NO: 8517 - DNA, 38 bp, Artificial Sequence
  Synthetic oligonucleotide
atgtacgccacacacacgtcccagcaacatctggctga

SEQ ID NO: 8518 - DNA, 37 bp, Artificial Sequence
  Synthetic oligonucleotide
gactagcatcggcactgtgatacggatgtttttccga

SEQ ID NO: 8519 - DNA, 36 bp, Artificial Sequence
  Synthetic oligonucleotide
gagcgaactgcagagtgatcgactcactgatccaca

SEQ ID NO: 8520 - DNA, 36 bp, Artificial Sequence
  Synthetic oligonucleotide
gcgaaagcacacgtcaacttatacttcgatccctaa

SEQ ID NO: 8521 - DNA, 36 bp, Artificial Sequence
  Synthetic oligonucleotide
tcacatggacggacaggcaatcattaaggtaggcta

SEQ ID NO: 8522 - DNA, 34 bp, Artificial Sequence
  Synthetic oligonucleotide
tccgccgcccgtcatgcccatttcctgttatttt

SEQ ID NO: 8523 - DNA, 36 bp, Artificial Sequence
  Synthetic oligonucleotide
ttgccaagtcggcccctgtctaccaagtctagtaca

SEQ ID NO: 8524 - DNA, 38 bp, Artificial Sequence
  Synthetic oligonucleotide
aacgcaaagggactgcatatcagccgtgcacttgatga

SEQ ID NO: 8525 - DNA, 38 bp, Artificial Sequence
  Synthetic oligonucleotide
acacaggcccaatgcagacagtggtcatctgcccatga

SEQ ID NO: 8526 - DNA, 38 bp, Artificial Sequence
  Synthetic oligonucleotide
atcacgcgccttccaccaggagagcaatacccagctga

SEQ ID NO: 8527 - DNA, 36 bp, Artificial Sequence
  Synthetic oligonucleotide
atgcatgctgaccccatcccacaccagatactttaa

SEQ ID NO: 8528 - DNA, 35 bp, Artificial Sequence
  Synthetic oligonucleotide
gaacgggggagtgctgcaaaatcctacttaccggt

SEQ ID NO: 8529 - DNA, 37 bp, Artificial Sequence
  Synthetic oligonucleotide
gacatgcgcgagcatgttaaacatcggtctcggagga

SEQ ID NO: 8530 - DNA, 36 bp, Artificial Sequence
  Synthetic oligonucleotide
gacccacacctgcatcttaatcgtgcacagttgtca

SEQ ID NO: 8531 - DNA, 36 bp, Artificial Sequence
  Synthetic oligonucleotide
gacgactgtcacggttgagtgttagacttgtgttaa

SEQ ID NO: 8532 - DNA, 36 bp, Artificial Sequence
  Synthetic oligonucleotide
gactccacagttcggcctgtcatgacaccacgatca

SEQ ID NO: 8533 - DNA, 38 bp, Artificial Sequence
  Synthetic oligonucleotide
gagacgcacagtagtcggacaagattgcgtatcgagga

SEQ ID NO: 8534 - DNA, 37 bp, Artificial Sequence
  Synthetic oligonucleotide
gatccgccgagtcggtcgatgaaatgctaaggcttga

SEQ ID NO: 8535 - DNA, 38 bp, Artificial Sequence
  Synthetic oligonucleotide
gatgctgtagtacacgtgcatcaagttacaaggcatga

SEQ ID NO: 8536 - DNA, 35 bp, Artificial Sequence
  Synthetic oligonucleotide
gcacggcgacaccagatcctaccattaccttaccc

SEQ ID NO: 8537 - DNA, 35 bp, Artificial Sequence
  Synthetic oligonucleotide
gccacccgcgccatcttttacagaagcctcacctt

SEQ ID NO: 8538 - DNA, 36 bp, Artificial Sequence
  Synthetic oligonucleotide
gccggtaggcatcacgatccaaggcacgcatctccg

SEQ ID NO: 8539 - DNA, 36 bp, Artificial Sequence
  Synthetic oligonucleotide
gttcgcgcaatcctggcaagaacctattaacctcta

SEQ ID NO: 8540 - DNA, 37 bp, Artificial Sequence
  Synthetic oligonucleotide
taacactgcggagtgtaagcggctacataacgaagga

SEQ ID NO: 8541 - DNA, 37 bp, Artificial Sequence
  Synthetic oligonucleotide
tcaccacaaggatgcgcgagaagtctggtggtacgga

SEQ ID NO: 8542 - DNA, 37 bp, Artificial Sequence
  Synthetic oligonucleotide
tccaaccccaatcgtctgtttgataccaagtacggga

SEQ ID NO: 8543 - DNA, 38 bp, Artificial Sequence
  Synthetic oligonucleotide
aacatgcgcttacatgccgccgaaccccgcaccggtga

SEQ ID NO: 8544 - DNA, 36 bp, Artificial Sequence
  Synthetic oligonucleotide
acaccatgccagcaacaacccacatactcctcggta

SEQ ID NO: 8545 - DNA, 35 bp, Artificial Sequence
  Synthetic oligonucleotide
acccacgccgggtacaaaacatttgcgctaattcg

SEQ ID NO: 8546 - DNA, 38 bp, Artificial Sequence
  Synthetic oligonucleotide
acgacactccggatggtaacgtttgacggacgacttga

SEQ ID NO: 8547 - DNA, 36 bp, Artificial Sequence
  Synthetic oligonucleotide
agaccccggatcccaatgcgggtgaggatctcgtaa

SEQ ID NO: 8548 - DNA, 36 bp, Artificial Sequence
  Synthetic oligonucleotide
agcacctccgcagatcactacctgccctccatggca

SEQ ID NO: 8549 - DNA, 37 bp, Artificial Sequence
  Synthetic oligonucleotide
atcacaccgaccgatgtatgacagcggcttggacgga

SEQ ID NO: 8550 - DNA, 35 bp, Artificial Sequence
  Synthetic oligonucleotide
atcacccaccaatgaagagtgttcgccgttgctgc

SEQ ID NO: 8551 - DNA, 35 bp, Artificial Sequence
  Synthetic oligonucleotide
cggggtagccactgatgtacaaaactcaagggaca

SEQ ID NO: 8552 - DNA, 36 bp, Artificial Sequence
  Synthetic oligonucleotide
gaacaggtgggggatgcctggtcactctgtcaagga

SEQ ID NO: 8553 - DNA, 37 bp, Artificial Sequence
  Synthetic oligonucleotide
gacggacagtagctggtaactaactgtctagttcgga

SEQ ID NO: 8554 - DNA, 37 bp, Artificial Sequence
  Synthetic oligonucleotide
gccgcaggagtcgaacgcgatcaaaaagcaagctgga

SEQ ID NO: 8555 - DNA, 37 bp, Artificial Sequence
  Synthetic oligonucleotide
gcgcacagtagcgattgggtcacagggcaggtactga

SEQ ID NO: 8556 - DNA, 38 bp, Artificial Sequence
  Synthetic oligonucleotide
gtgcggtacgcagaaatgaagtttgagagacttcctga

SEQ ID NO: 8557 - DNA, 37 bp, Artificial Sequence
  Synthetic oligonucleotide
taacacaacaaaggctggaaatcgtcatccttatcga

SEQ ID NO: 8558 - DNA, 36 bp, Artificial Sequence
  Synthetic oligonucleotide
tacacatgcgctcatagggaaacttactacgttata

SEQ ID NO: 8559 - DNA, 36 bp, Artificial Sequence
  Synthetic oligonucleotide
tagtactggccagtccgactttgaccccgctaacca

SEQ ID NO: 8560 - DNA, 36 bp, Artificial Sequence
  Synthetic oligonucleotide
tccacccgcgctgatacacactgcgtttggtacaca

SEQ ID NO: 8561 - DNA, 38 bp, Artificial Sequence
  Synthetic oligonucleotide
tgacgaacgaaggcggattgtgttgacggtaccggtga

SEQ ID NO: 8562 - DNA, 35 bp, Artificial Sequence
  Synthetic oligonucleotide
tgcataagcaagctgggattgggataaaccatatg

SEQ ID NO: 8563 - DNA, 35 bp, Artificial Sequence
  Synthetic oligonucleotide
acaaccgcatgaggaggaggcgtggacatgtaacc

SEQ ID NO: 8564 - DNA, 37 bp, Artificial Sequence
  Synthetic oligonucleotide
acacccaccacagttgcgcttgaaggggtctaaacga

SEQ ID NO: 8565 - DNA, 38 bp, Artificial Sequence
  Synthetic oligonucleotide
gacgactcagaaggatgaagaggggaacgtaatggtga

SEQ ID NO: 8566 - DNA, 36 bp, Artificial Sequence
  Synthetic oligonucleotide
gagtcgccgcacatgatccacgctctcgaattgaca

SEQ ID NO: 8567 - DNA, 35 bp, Artificial Sequence
  Synthetic oligonucleotide
gcacacatgtcgtcgatgctgatcttattctggag

SEQ ID NO: 8568 - DNA, 38 bp, Artificial Sequence
  Synthetic oligonucleotide
gcacatcgactggggttcgccaggccgaccgtccatga

SEQ ID NO: 8569 - DNA, 35 bp, Artificial Sequence
  Synthetic oligonucleotide
gcccatccaaccagcgttctacctatcaggccatc

SEQ ID NO: 8570 - DNA, 37 bp, Artificial Sequence
  Synthetic oligonucleotide
gcgatgtgcacgtctgggttctatatgcggacactga

SEQ ID NO: 8571 - DNA, 34 bp, Artificial Sequence
  Synthetic oligonucleotide
ggagacgccagtctgcacgtttatatcaaccgaa

SEQ ID NO: 8572 - DNA, 38 bp, Artificial Sequence
  Synthetic oligonucleotide
tcacgcgcaagacctgcaactcatacacctcgcattga

SEQ ID NO: 8573 - DNA, 36 bp, Artificial Sequence
  Synthetic oligonucleotide
tcccaccacaccaaccatatactgaccccgcataca

SEQ ID NO: 8574 - DNA, 37 bp, Artificial Sequence
  Synthetic oligonucleotide
tgacaactgcaatagaagagatcggtaggataggaga

SEQ ID NO: 8575 - DNA, 37 bp, Artificial Sequence
  Synthetic oligonucleotide
tgaccacatacgaacagcacacgaggtccaaagtaga

SEQ ID NO: 8576 - DNA, 37 bp, Artificial Sequence
  Synthetic oligonucleotide
tgacccgcacatgctgaaggaatttcccaggattgga

SEQ ID NO: 8577 - DNA, 36 bp, Artificial Sequence
  Synthetic oligonucleotide
tgtgacgccacatctgacctaccgttcacaagtcca

SEQ ID NO: 8578 - DNA, 35 bp, Artificial Sequence
  Synthetic oligonucleotide
ttgcgcaacaccggaggacatgaggaagttacact

SEQ ID NO: 8579 - DNA, 37 bp, Artificial Sequence
  Synthetic oligonucleotide
ttgcggagcgatacacacatagactagtacaccatga

SEQ ID NO: 8580 - DNA, 37 bp, Artificial Sequence
  Synthetic oligonucleotide
aaacaccgcaatagaacgttgacaggcgctgatcgga

SEQ ID NO: 8581 - DNA, 38 bp, Artificial Sequence
  Synthetic oligonucleotide
aaccagtgaggaacgaggggacaatgggcagttagtga

SEQ ID NO: 8582 - DNA, 36 bp, Artificial Sequence
  Synthetic oligonucleotide
acacacatcggaccgtgatgtacgtgataccattca

SEQ ID NO: 8583 - DNA, 36 bp, Artificial Sequence
  Synthetic oligonucleotide
agccacgcacagtacagcagacgtatcctctgttta

SEQ ID NO: 8584 - DNA, 38 bp, Artificial Sequence
  Synthetic oligonucleotide
atcaaccacaggtggagacgcgtcgggcacttgcgtga

SEQ ID NO: 8585 - DNA, 37 bp, Artificial Sequence
  Synthetic oligonucleotide
atcgacacgggggcatgcataagcccaggaatccgga

SEQ ID NO: 8586 - DNA, 36 bp, Artificial Sequence
  Synthetic oligonucleotide
gacaacgcgcgtgtaagtgacgatgatcaccatcga

SEQ ID NO: 8587 - DNA, 36 bp, Artificial Sequence
  Synthetic oligonucleotide
gacacataggaggtgaccgtatggctgacatataca

SEQ ID NO: 8588 - DNA, 38 bp, Artificial Sequence
  Synthetic oligonucleotide
gaccagcagacgagacttaaaagggatgcatgcggtga

SEQ ID NO: 8589 - DNA, 35 bp, Artificial Sequence
  Synthetic oligonucleotide
gcaccacgagcgttcccagagcctgcactgctagt

SEQ ID NO: 8590 - DNA, 36 bp, Artificial Sequence
  Synthetic oligonucleotide
gccaagacaaagcgatcaaagttaactaccatcaaa

SEQ ID NO: 8591 - DNA, 35 bp, Artificial Sequence
  Synthetic oligonucleotide
gccaatacgtccccaatatcgacaagagggcatgg

SEQ ID NO: 8592 - DNA, 37 bp, Artificial Sequence
  Synthetic oligonucleotide
gccgacacgttgtgagccctcgagtcacccatgacga

SEQ ID NO: 8593 - DNA, 38 bp, Artificial Sequence
  Synthetic oligonucleotide
gcgacaagcacggtatgttacgttctcaccattattga

SEQ ID NO: 8594 - DNA, 35 bp, Artificial Sequence
  Synthetic oligonucleotide
tacgacctggacacctgcatttttgtgatcgcact

SEQ ID NO: 8595 - DNA, 36 bp, Artificial Sequence
  Synthetic oligonucleotide
tacgcagaccgaaactgaaccctgacgtcctaccca

SEQ ID NO: 8596 - DNA, 35 bp, Artificial Sequence
  Synthetic oligonucleotide
tacgtggcacaacggtacttcgcgaggcttgatat

SEQ ID NO: 8597 - DNA, 37 bp, Artificial Sequence
  Synthetic oligonucleotide
tcacacgcctagaccttaccaggtaaatctggttgga

SEQ ID NO: 8598 - DNA, 36 bp, Artificial Sequence
  Synthetic oligonucleotide
tcccgacggagcgcactatacatgcgatttcgaaca

SEQ ID NO: 8599 - DNA, 37 bp, Artificial Sequence
  Synthetic oligonucleotide
tgacgctgtccgccattgacacgactgacaactacga

SEQ ID NO: 8600 - DNA, 31 bp, Artificial Sequence
  Synthetic oligonucleotide
tgcacagagcgacacccacttcccgcacctc

SEQ ID NO: 8601 - DNA, 35 bp, Artificial Sequence
  Synthetic oligonucleotide
tgtgaccccgtacgaatcaaggcccgagagttggc

SEQ ID NO: 8602 - DNA, 36 bp, Artificial Sequence
  Synthetic oligonucleotide
aacccacaccccaaataccgaaacatcatgtcggga

SEQ ID NO: 8603 - DNA, 38 bp, Artificial Sequence
  Synthetic oligonucleotide
acaccactgccaacgcgggagagaacgcaatcaaatga

SEQ ID NO: 8604 - DNA, 35 bp, Artificial Sequence
  Synthetic oligonucleotide
accaccgcaagcacatcagcgcccatcaatgagac

SEQ ID NO: 8605 - DNA, 36 bp, Artificial Sequence
  Synthetic oligonucleotide
acccacaccgcacatctggtgtcttatagcgtcgaa

SEQ ID NO: 8606 - DNA, 35 bp, Artificial Sequence
  Synthetic oligonucleotide
actgacacacccgcatatgtgcaggttttggactc

SEQ ID NO: 8607 - DNA, 36 bp, Artificial Sequence
  Synthetic oligonucleotide
atgacccggtaggtacggacgcgttcatctaacaca

SEQ ID NO: 8608 - DNA, 37 bp, Artificial Sequence
  Synthetic oligonucleotide
ccaacggggacgtcgggagtcggaaagatagatctga

SEQ ID NO: 8609 - DNA, 36 bp, Artificial Sequence
  Synthetic oligonucleotide
gacacaccgcatagctatcactgaagctcacggcaa

SEQ ID NO: 8610 - DNA, 36 bp, Artificial Sequence
  Synthetic oligonucleotide
gaccgcaacgacatggggccacgatctgttagtctg

SEQ ID NO: 8611 - DNA, 38 bp, Artificial Sequence
  Synthetic oligonucleotide
gaccgcaagacggacgattatagtcctgaagtacgtga

SEQ ID NO: 8612 - DNA, 35 bp, Artificial Sequence
  Synthetic oligonucleotide
gacgaacgccgaatcgatgagtcacaccggactca

SEQ ID NO: 8613 - DNA, 38 bp, Artificial Sequence
  Synthetic oligonucleotide
gacgctgaagtagttgtagggaggccgtaagggagtga

SEQ ID NO: 8614 - DNA, 36 bp, Artificial Sequence
  Synthetic oligonucleotide
gagacgcagtcccgagtacctctcgcttgagcacca

SEQ ID NO: 8615 - DNA, 35 bp, Artificial Sequence
  Synthetic oligonucleotide
gatgacacgcgacctcagcaaccgtacacacatct

SEQ ID NO: 8616 - DNA, 36 bp, Artificial Sequence
  Synthetic oligonucleotide
gatggcacaatcgcggacgtgcaaggactccacgta

SEQ ID NO: 8617 - DNA, 35 bp, Artificial Sequence
  Synthetic oligonucleotide
gccaggacgacactaggtgacttacgtaagacatt

SEQ ID NO: 8618 - DNA, 35 bp, Artificial Sequence
  Synthetic oligonucleotide
gccatcccaatgctgacactttactgaagggcgcc

SEQ ID NO: 8619 - DNA, 35 bp, Artificial Sequence
  Synthetic oligonucleotide
gtagccaacggtagggctaaacaggggtagcaggg

SEQ ID NO: 8620 - DNA, 36 bp, Artificial Sequence
  Synthetic oligonucleotide
gtgccaaacgtgagcattgtgcgtaaattaagatta

SEQ ID NO: 8621 - DNA, 35 bp, Artificial Sequence
  Synthetic oligonucleotide
tagccacagcctgtcaggaatcctaatcacaaatc

SEQ ID NO: 8622 - DNA, 35 bp, Artificial Sequence
  Synthetic oligonucleotide
tcaagcgcacggattttctggaaggacgacacgat

SEQ ID NO: 8623 - DNA, 37 bp, Artificial Sequence
  Synthetic oligonucleotide
tgacaagccagcttaaggtcgtaccgctgggtccgga

SEQ ID NO: 8624 - DNA, 38 bp, Artificial Sequence
  Synthetic oligonucleotide
tgtgacgtacgctgtgtgctcaagaggccggtgactga

SEQ ID NO: 8625 - DNA, 35 bp, Artificial Sequence
  Synthetic oligonucleotide
acactcgcggcacagtcttcgaacctacccacgca

SEQ ID NO: 8626 - DNA, 36 bp, Artificial Sequence
  Synthetic oligonucleotide
acgcactcgtagccaccgtccatctcgattcattga

SEQ ID NO: 8627 - DNA, 37 bp, Artificial Sequence
  Synthetic oligonucleotide
atcgccccctcgcgatgtgtggtgagtacaagctgga

SEQ ID NO: 8628 - DNA, 38 bp, Artificial Sequence
  Synthetic oligonucleotide
gaaccacaccgctgtcacctgaacgacatcagacgtga

SEQ ID NO: 8629 - DNA, 37 bp, Artificial Sequence
  Synthetic oligonucleotide
gaagaccgcggagatttgttatggtagggatcggtga

SEQ ID NO: 8630 - DNA, 35 bp, Artificial Sequence
  Synthetic oligonucleotide
gaatggccgggttggttcccgcattcagttacatg

SEQ ID NO: 8631 - DNA, 37 bp, Artificial Sequence
  Synthetic oligonucleotide
gacaacggccaatatcaatgacggaggaccagtctga

SEQ ID NO: 8632 - DNA, 37 bp, Artificial Sequence
  Synthetic oligonucleotide
gaccacccaacggtgcgaacgaatccagctggagtta

SEQ ID NO: 8633 - DNA, 35 bp, Artificial Sequence
  Synthetic oligonucleotide
gacgcactaacccgcgcgacccatctctgtcaccg

SEQ ID NO: 8634 - DNA, 35 bp, Artificial Sequence
  Synthetic oligonucleotide
gacgcgaagcatgcactccgaggggacaaggcgca

SEQ ID NO: 8635 - DNA, 38 bp, Artificial Sequence
  Synthetic oligonucleotide
gacgggggcaagaaggaatgtacgagacgatagcttga

SEQ ID NO: 8636 - DNA, 36 bp, Artificial Sequence
  Synthetic oligonucleotide
gatccagccagtcgttggatcacgtcacatcgaaca

SEQ ID NO: 8637 - DNA, 35 bp, Artificial Sequence
  Synthetic oligonucleotide
gatccgcaacaacgattatgagtgattggaaaccg

SEQ ID NO: 8638 - DNA, 36 bp, Artificial Sequence
  Synthetic oligonucleotide
gcaccagcccgaatggagttctttcgcttattataa

SEQ ID NO: 8639 - DNA, 37 bp, Artificial Sequence
  Synthetic oligonucleotide
gcacgaaccccaactactgaccccgcctcgaacagga

SEQ ID NO: 8640 - DNA, 38 bp, Artificial Sequence
  Synthetic oligonucleotide
gcatgcgcaggttcacctgttgacacacttggtggtga

SEQ ID NO: 8641 - DNA, 36 bp, Artificial Sequence
  Synthetic oligonucleotide
gccatcgtaacggggtgagtgccgggactgcaagaa

SEQ ID NO: 8642 - DNA, 38 bp, Artificial Sequence
  Synthetic oligonucleotide
gcgaacgtcccaagatgtatcaagctacaaatcactga

SEQ ID NO: 8643 - DNA, 36 bp, Artificial Sequence
  Synthetic oligonucleotide
ggaccgagcgacccatgagtccccacgatgttttca

SEQ ID NO: 8644 - DNA, 35 bp, Artificial Sequence
  Synthetic oligonucleotide
gtcgagggcccgacaatttacgccagtctgagtca

SEQ ID NO: 8645 - DNA, 37 bp, Artificial Sequence
  Synthetic oligonucleotide
gttgacgcatctgtgacactacggtctatcatctgga

SEQ ID NO: 8646 - DNA, 37 bp, Artificial Sequence
  Synthetic oligonucleotide
tgtcaaggcccatgtgttcacctgctctgtacgttga

SEQ ID NO: 8647 - DNA, 35 bp, Artificial Sequence
  Synthetic oligonucleotide
ttcaccgcacacttctgctacctgcccaggtgacg

SEQ ID NO: 8648 - DNA, 35 bp, Artificial Sequence
  Synthetic oligonucleotide
acactgcacgcaaaaccgattactgccctcggtat

SEQ ID NO: 8649 - DNA, 35 bp, Artificial Sequence
  Synthetic oligonucleotide
actcgccgcacatagcaacagccgggcccaaatcg

SEQ ID NO: 8650 - DNA, 38 bp, Artificial Sequence
  Synthetic oligonucleotide
agacgcccaacgttaattgctctacggactatacctga

SEQ ID NO: 8651 - DNA, 36 bp, Artificial Sequence
  Synthetic oligonucleotide
atgcatcccaggagcagagtaactgtgcaaagtgta

SEQ ID NO: 8652 - DNA, 38 bp, Artificial Sequence
  Synthetic oligonucleotide
gacatggagtccggttggcagtaaagacttgtgaatga

SEQ ID NO: 8653 - DNA, 35 bp, Artificial Sequence
  Synthetic oligonucleotide
gaccagaccggtcaaacactgactgatattcgaga

SEQ ID NO: 8654 - DNA, 35 bp, Artificial Sequence
  Synthetic oligonucleotide
gacccgtcggaccggaacatcatcatcgatgagac

SEQ ID NO: 8655 - DNA, 35 bp, Artificial Sequence
  Synthetic oligonucleotide
gacgacgatggggcgacacgtatttcatcgagcta

SEQ ID NO: 8656 - DNA, 36 bp, Artificial Sequence
  Synthetic oligonucleotide
gacgcaacgtgctgcccccgatgccactgtttcaca

SEQ ID NO: 8657 - DNA, 35 bp, Artificial Sequence
  Synthetic oligonucleotide
gagccaagtcgcatgagttcctatgtttccttatt

SEQ ID NO: 8658 - DNA, 37 bp, Artificial Sequence
  Synthetic oligonucleotide
gatcacacaggcacagatctagcactaaccggatcga

SEQ ID NO: 8659 - DNA, 35 bp, Artificial Sequence
  Synthetic oligonucleotide
gcaaaccacgcccgtattgatgcgaaatcacgttg

SEQ ID NO: 8660 - DNA, 38 bp, Artificial Sequence
  Synthetic oligonucleotide
gcaaccaacggcatacgcatacaccacacgtcaggtga

SEQ ID NO: 8661 - DNA, 35 bp, Artificial Sequence
  Synthetic oligonucleotide
gcacgcagaagcaaaaccaacgccacaccgctcaa

SEQ ID NO: 8662 - DNA, 37 bp, Artificial Sequence
  Synthetic oligonucleotide
gccaacagacatctgcaacctttttccgaggagtcga

SEQ ID NO: 8663 - DNA, 37 bp, Artificial Sequence
  Synthetic oligonucleotide
gccacgtgcagtgggcttcctaaccgttctatttcga

SEQ ID NO: 8664 - DNA, 38 bp, Artificial Sequence
  Synthetic oligonucleotide
gtgaccgggaacgcattgtagaccgcttccacacttga

SEQ ID NO: 8665 - DNA, 35 bp, Artificial Sequence
  Synthetic oligonucleotide
taccaaacgcctcaataccctgtccaccgcccacg

SEQ ID NO: 8666 - DNA, 35 bp, Artificial Sequence
  Synthetic oligonucleotide
tacgcagttgcaaatgcgacccttgctacttaact

SEQ ID NO: 8667 - DNA, 35 bp, Artificial Sequence
  Synthetic oligonucleotide
tcaacaccgggagccgcgaagtgacgctattcagt

SEQ ID NO: 8668 - DNA, 35 bp, Artificial Sequence
  Synthetic oligonucleotide
tcacgacgtcacgcatacagccccacgacttacct

SEQ ID NO: 8669 - DNA, 37 bp, Artificial Sequence
  Synthetic oligonucleotide
tcatcacagaacggggagacatcggaaatgggtagga

SEQ ID NO: 8670 - DNA, 36 bp, Artificial Sequence
  Synthetic oligonucleotide
tccagaaccggttgagacgtgtcatgcgatctatta

SEQ ID NO: 8671 - DNA, 37 bp, Artificial Sequence
  Synthetic oligonucleotide
tgaccactgggtacaatcgttgggacgggcgttgaga

SEQ ID NO: 8672 - DNA, 36 bp, Artificial Sequence
  Synthetic oligonucleotide
tgccacgtccgatcgacgtatctcgtaaccaaccga

SEQ ID NO: 8673 - DNA, 38 bp, Artificial Sequence
  Synthetic oligonucleotide
tgtggtgcccagccgatgatcgttatgcgagggcgtga

SEQ ID NO: 8674 - DNA, 35 bp, Artificial Sequence
  Synthetic oligonucleotide
aacaccctcagcccttagcactcctcttctacagt

SEQ ID NO: 8675 - DNA, 36 bp, Artificial Sequence
  Synthetic oligonucleotide
aacgacggccagatgaccagaaacgggctggggcca

SEQ ID NO: 8676 - DNA, 37 bp, Artificial Sequence
  Synthetic oligonucleotide
accaacaccgtatgaatagtggcggcaaacactgtga

SEQ ID NO: 8677 - DNA, 35 bp, Artificial Sequence
  Synthetic oligonucleotide
acgcgcccacgcctcacagccccccatgtacttac

SEQ ID NO: 8678 - DNA, 35 bp, Artificial Sequence
  Synthetic oligonucleotide
actgaccccgaacggaccccgcatatggatacaat

SEQ ID NO: 8679 - DNA, 38 bp, Artificial Sequence
  Synthetic oligonucleotide
agccacggatccgccgcgaacaggatcaagcatcctga

SEQ ID NO: 8680 - DNA, 36 bp, Artificial Sequence
  Synthetic oligonucleotide
atgtggaccagcatccacgctagcacgactaatcca

SEQ ID NO: 8681 - DNA, 37 bp, Artificial Sequence
  Synthetic oligonucleotide
gaacggaacgggtacacgtccgcacgtgagtatgcga

SEQ ID NO: 8682 - DNA, 37 bp, Artificial Sequence
  Synthetic oligonucleotide
gacgaacgcccggaatgagtgtgttgacactaatgga

SEQ ID NO: 8683 - DNA, 35 bp, Artificial Sequence
  Synthetic oligonucleotide
gacgcaggtgcgatccaaatatgcagtgggacgta

SEQ ID NO: 8684 - DNA, 35 bp, Artificial Sequence
  Synthetic oligonucleotide
gatgagcgaggcctatccacggacacctgttggag

SEQ ID NO: 8685 - DNA, 36 bp, Artificial Sequence
  Synthetic oligonucleotide
gcaacgcacccgagacttatcgaagatgatatccca

SEQ ID NO: 8686 - DNA, 38 bp, Artificial Sequence
  Synthetic oligonucleotide
gccatgccagtgcgtggacatcagctctctcgtgttga

SEQ ID NO: 8687 - DNA, 34 bp, Artificial Sequence
  Synthetic oligonucleotide
gccctcgccggtcggagcagttgaaaagcttaag

SEQ ID NO: 8688 - DNA, 35 bp, Artificial Sequence
  Synthetic oligonucleotide
gtcgaaccgtgaggctctgatacgtaccagggaat

SEQ ID NO: 8689 - DNA, 35 bp, Artificial Sequence
  Synthetic oligonucleotide
gtgaacgccgaacgtgggcaattctcagttattac

SEQ ID NO: 8690 - DNA, 35 bp, Artificial Sequence
  Synthetic oligonucleotide
gtggacacgccatctgtcaccactaaggcggtcta

SEQ ID NO: 8691 - DNA, 37 bp, Artificial Sequence
  Synthetic oligonucleotide
tactgaccccggtgatggatgtcatactggaacacga

SEQ ID NO: 8692 - DNA, 37 bp, Artificial Sequence
  Synthetic oligonucleotide
tatgcgccaggatacaaggtgaatgtgtgaaaaggga

SEQ ID NO: 8693 - DNA, 38 bp, Artificial Sequence
  Synthetic oligonucleotide
tcaacacccacagatcggttctgtcagtgaagtcttga

SEQ ID NO: 8694 - DNA, 35 bp, Artificial Sequence
  Synthetic oligonucleotide
tcacaggctgtgtgcgaactcagaagatattatcc

SEQ ID NO: 8695 - DNA, 36 bp, Artificial Sequence
  Synthetic oligonucleotide
tccaccccgccgattatacagcggcctgcgtaccca

SEQ ID NO: 8696 - DNA, 36 bp, Artificial Sequence
  Synthetic oligonucleotide
tgacgcccccgcggtcttttacgggagtcccaacga

SEQ ID NO: 8697 - DNA, 35 bp, Artificial Sequence
  Synthetic oligonucleotide
tgtcccgcagatccgttcatcctcgtcctccttag

SEQ ID NO: 8698 - DNA, 35 bp, Artificial Sequence
  Synthetic oligonucleotide
ttgtgccccagatcatctcagtaggttcgatagag

SEQ ID NO: 8699 - DNA, 38 bp, Artificial Sequence
  Synthetic oligonucleotide
aaaccacacacaatcggtcgagacgccggatacgctga

SEQ ID NO: 8700 - DNA, 35 bp, Artificial Sequence
  Synthetic oligonucleotide
aagccaacccaacaagctgacccccaggacaggac

SEQ ID NO: 8701 - DNA, 37 bp, Artificial Sequence
  Synthetic oligonucleotide
acacagccggcacaatacggatgtcccaaatgttgga

SEQ ID NO: 8702 - DNA, 35 bp, Artificial Sequence
  Synthetic oligonucleotide
acacccacgcagagagctacaaatgacacggctca

SEQ ID NO: 8703 - DNA, 36 bp, Artificial Sequence
  Synthetic oligonucleotide
acactcaaccgcacatgtatcgccgcccctaccgaa

SEQ ID NO: 8704 - DNA, 35 bp, Artificial Sequence
  Synthetic oligonucleotide
accgaacaggccggcgccttcttcactatccacgt

SEQ ID NO: 8705 - DNA, 36 bp, Artificial Sequence
  Synthetic oligonucleotide
actgcaaacaatggggctgaacggtcgaagtgcgga

SEQ ID NO: 8706 - DNA, 35 bp, Artificial Sequence
  Synthetic oligonucleotide
atcgatgcacgtgaagtatagtagtcactcccact

SEQ ID NO: 8707 - DNA, 35 bp, Artificial Sequence
  Synthetic oligonucleotide
cacaaagcgctactggacaacccacctgtcttaga

SEQ ID NO: 8708 - DNA, 35 bp, Artificial Sequence
  Synthetic oligonucleotide
gaacgcgaacgagcatagccgagaaggtgctcgat

SEQ ID NO: 8709 - DNA, 38 bp, Artificial Sequence
  Synthetic oligonucleotide
gacaaaccgccaccgccatgtgggcagttcggagttga

SEQ ID NO: 8710 - DNA, 35 bp, Artificial Sequence
  Synthetic oligonucleotide
gacccgccggcattccgtattctacaactcgagac

SEQ ID NO: 8711 - DNA, 36 bp, Artificial Sequence
  Synthetic oligonucleotide
gacgccccgcaggctgtgatcaagggacggaactta

SEQ ID NO: 8712 - DNA, 35 bp, Artificial Sequence
  Synthetic oligonucleotide
gacggagcaaacacggtgtcgggagtaaagaaatg

SEQ ID NO: 8713 - DNA, 38 bp, Artificial Sequence
  Synthetic oligonucleotide
gaggtcgcgcttctacacttccagtcatctctagttga

SEQ ID NO: 8714 - DNA, 37 bp, Artificial Sequence
  Synthetic oligonucleotide
gctgacgtgccatgtctatagggacactatggccaga

SEQ ID NO: 8715 - DNA, 36 bp, Artificial Sequence
  Synthetic oligonucleotide
taacatcccccctcgtcgcatgcgtgggtataacta

SEQ ID NO: 8716 - DNA, 36 bp, Artificial Sequence
  Synthetic oligonucleotide
tacaccgtcccgtacacgcccatgatgcttccacca

SEQ ID NO: 8717 - DNA, 38 bp, Artificial Sequence
  Synthetic oligonucleotide
tacacgctccagcaatagcagttgatgttagcacttga

SEQ ID NO: 8718 - DNA, 38 bp, Artificial Sequence
  Synthetic oligonucleotide
tagctgacaacagccgcagtaatgaagatatcatgtga

SEQ ID NO: 8719 - DNA, 35 bp, Artificial Sequence
  Synthetic oligonucleotide
tcaatccggcgccacaatcatgtactgcctcgcat

SEQ ID NO: 8720 - DNA, 36 bp, Artificial Sequence
  Synthetic oligonucleotide
tcagcggtcaagcgctccagaggattcaaagcggta

SEQ ID NO: 8721 - DNA, 35 bp, Artificial Sequence
  Synthetic oligonucleotide
tccaccggaaggtgcgtgttaattagacggcgtgg

SEQ ID NO: 8722 - DNA, 37 bp, Artificial Sequence
  Synthetic oligonucleotide
tgaccgccaaaagggagctattggtcacaaacgcgga

SEQ ID NO: 8723 - DNA, 37 bp, Artificial Sequence
  Synthetic oligonucleotide
tgcgccgcacatctctacatccgccattccgtaccga

SEQ ID NO: 8724 - DNA, 36 bp, Artificial Sequence
  Synthetic oligonucleotide
acaacgcgcactcgacgtctcgagttacggtagtca

SEQ ID NO: 8725 - DNA, 36 bp, Artificial Sequence
  Synthetic oligonucleotide
accactgccaggagatgcatgccggccccatagaca

SEQ ID NO: 8726 - DNA, 38 bp, Artificial Sequence
  Synthetic oligonucleotide
atgggcgcaagttgattggtcgcacgaggaagaaatga

SEQ ID NO: 8727 - DNA, 37 bp, Artificial Sequence
  Synthetic oligonucleotide
gacgacaaggtcctctgagagatcgcggcccaaagga

SEQ ID NO: 8728 - DNA, 36 bp, Artificial Sequence
  Synthetic oligonucleotide
gacggtggggcgcacagggacctccactacggttga

SEQ ID NO: 8729 - DNA, 36 bp, Artificial Sequence
  Synthetic oligonucleotide
gagccagtcacaggtaatacagctcatctcacctaa

SEQ ID NO: 8730 - DNA, 35 bp, Artificial Sequence
  Synthetic oligonucleotide
gagtgcgtacagctacctaagaccccgtttttcac

SEQ ID NO: 8731 - DNA, 37 bp, Artificial Sequence
  Synthetic oligonucleotide
gcaacaccagaacgcctgagacgccgtagcacgatga

SEQ ID NO: 8732 - DNA, 35 bp, Artificial Sequence
  Synthetic oligonucleotide
ggacacccacaaatcaaggaagtggctaggcaata

SEQ ID NO: 8733 - DNA, 35 bp, Artificial Sequence
  Synthetic oligonucleotide
gggatgaccagggatagatagaacgtcgcaatagg

SEQ ID NO: 8734 - DNA, 35 bp, Artificial Sequence
  Synthetic oligonucleotide
gtgatggtccgtgcgctatccgtcctttatcgttt

SEQ ID NO: 8735 - DNA, 38 bp, Artificial Sequence
  Synthetic oligonucleotide
gtggtccacgtgcgagtttagcgaggcatgactcatga

SEQ ID NO: 8736 - DNA, 36 bp, Artificial Sequence
  Synthetic oligonucleotide
tagacaaccccagtagtctgcgctcgttactacgta

SEQ ID NO: 8737 - DNA, 36 bp, Artificial Sequence
  Synthetic oligonucleotide
tatccacagggcgaaggcaaagtgtcatgagtgtaa

SEQ ID NO: 8738 - DNA, 37 bp, Artificial Sequence
  Synthetic oligonucleotide
aacacccgggcactatcagagacgacgtagtaggcga

SEQ ID NO: 8739 - DNA, 37 bp, Artificial Sequence
  Synthetic oligonucleotide
aacacgcgcaaacgcacaccgctacatggccaccgga

SEQ ID NO: 8740 - DNA, 38 bp, Artificial Sequence
  Synthetic oligonucleotide
acaccccgcagtgacgtggtacagttcccgccctctga

SEQ ID NO: 8741 - DNA, 35 bp, Artificial Sequence
  Synthetic oligonucleotide
acacgcacagaggtcgaaggaacgagttaattacg

SEQ ID NO: 8742 - DNA, 36 bp, Artificial Sequence
  Synthetic oligonucleotide
accaccaccggagatgagtacgtgaacgctcgtaaa

SEQ ID NO: 8743 - DNA, 35 bp, Artificial Sequence
  Synthetic oligonucleotide
accaccgggcacatggaggaagggtgacgtccatc

SEQ ID NO: 8744 - DNA, 38 bp, Artificial Sequence
  Synthetic oligonucleotide
accaccggtgcactactgatattgtaacctactattga

SEQ ID NO: 8745 - DNA, 35 bp, Artificial Sequence
  Synthetic oligonucleotide
accacgcaggctgggaccgaagaacagcatatcgc

SEQ ID NO: 8746 - DNA, 38 bp, Artificial Sequence
  Synthetic oligonucleotide
acccgtggctggtgcaccccgaagacaggtgaggttga

SEQ ID NO: 8747 - DNA, 35 bp, Artificial Sequence
  Synthetic oligonucleotide
acgcgcaagatagctaggtgtatcgagggacgtca

SEQ ID NO: 8748 - DNA, 35 bp, Artificial Sequence
  Synthetic oligonucleotide
atcgacacggcacggtaataggcggtcaatgctgc

SEQ ID NO: 8749 - DNA, 35 bp, Artificial Sequence
  Synthetic oligonucleotide
gaacacaccgccatcgatgtcatggtcagtctccc

SEQ ID NO: 8750 - DNA, 35 bp, Artificial Sequence
  Synthetic oligonucleotide
gatccgcccggaaggaactacgaatgtaagttagc

SEQ ID NO: 8751 - DNA, 35 bp, Artificial Sequence
  Synthetic oligonucleotide
gcacaaccggccagccattaggtgggaccaccaca

SEQ ID NO: 8752 - DNA, 35 bp, Artificial Sequence
  Synthetic oligonucleotide
gcacaacgggcacgtgtgcttaaactaccgttgaa

SEQ ID NO: 8753 - DNA, 35 bp, Artificial Sequence
  Synthetic oligonucleotide
gcacatggcgttgatttatagccgctttacgttcg

SEQ ID NO: 8754 - DNA, 36 bp, Artificial Sequence
  Synthetic oligonucleotide
gcaggtgctgtccgttaatgcgtgtttgtaatcgta

SEQ ID NO: 8755 - DNA, 37 bp, Artificial Sequence
  Synthetic oligonucleotide
gcatagccgcagaccgcatacatcagaagtgagcgga

SEQ ID NO: 8756 - DNA, 38 bp, Artificial Sequence
  Synthetic oligonucleotide
gcatggccggctggacatcaacgtccgcgaaggcatga

SEQ ID NO: 8757 - DNA, 38 bp, Artificial Sequence
  Synthetic oligonucleotide
gccacatgtgtacacatgatcttgagttgttgccgtga

SEQ ID NO: 8758 - DNA, 35 bp, Artificial Sequence
  Synthetic oligonucleotide
ggacccatcccaggtactgcctagtatcgttgtgc

SEQ ID NO: 8759 - DNA, 35 bp, Artificial Sequence
  Synthetic oligonucleotide
ggaggcgatagactccacgggacgtcacgtgacga

SEQ ID NO: 8760 - DNA, 37 bp, Artificial Sequence
  Synthetic oligonucleotide
tgcgaagccacaagcgcagtaagagtacgttggttga

SEQ ID NO: 8761 - DNA, 37 bp, Artificial Sequence
  Synthetic oligonucleotide
ttagccagatcgctgcgaattgaaggatctgatagga

SEQ ID NO: 8762 - DNA, 35 bp, Artificial Sequence
  Synthetic oligonucleotide
aacgcagaccagtcagacggcgtcttaacctccat

SEQ ID NO: 8763 - DNA, 37 bp, Artificial Sequence
  Synthetic oligonucleotide
acacgagcacgcatagttcgatcctcactgctctcga

SEQ ID NO: 8764 - DNA, 35 bp, Artificial Sequence
  Synthetic oligonucleotide
acccactccagacacgaaccgttcaacatccttcg

SEQ ID NO: 8765 - DNA, 35 bp, Artificial Sequence
  Synthetic oligonucleotide
accgatcgggcttactgtgtacggctacagtacag

SEQ ID NO: 8766 - DNA, 36 bp, Artificial Sequence
  Synthetic oligonucleotide
acgacggacgtgagaaagattttaatccgatggaaa

SEQ ID NO: 8767 - DNA, 35 bp, Artificial Sequence
  Synthetic oligonucleotide
actcacacggactgctctgtaacgcttggagatgg

SEQ ID NO: 8768 - DNA, 36 bp, Artificial Sequence
  Synthetic oligonucleotide
ccaccgagaagcgctcgtgtgcacgctgcagtggga

SEQ ID NO: 8769 - DNA, 35 bp, Artificial Sequence
  Synthetic oligonucleotide
gaacaacgcaggaactggccctgagagaacaatgc

SEQ ID NO: 8770 - DNA, 38 bp, Artificial Sequence
  Synthetic oligonucleotide
gcaagccacgttctttctcgtatagctcgtccttttga

SEQ ID NO: 8771 - DNA, 36 bp, Artificial Sequence
  Synthetic oligonucleotide
gcacacctccgaacttgctacagtagtagacttcca

SEQ ID NO: 8772 - DNA, 38 bp, Artificial Sequence
  Synthetic oligonucleotide
gcaccatgctcgtgacgtgttgattgactgctgattga

SEQ ID NO: 8773 - DNA, 35 bp, Artificial Sequence
  Synthetic oligonucleotide
gcccaacaccaacctacacggtgcatacacatcac

SEQ ID NO: 8774 - DNA, 36 bp, Artificial Sequence
  Synthetic oligonucleotide
gccgacgggcgctgagacttaaagccacatcttaca

SEQ ID NO: 8775 - DNA, 35 bp, Artificial Sequence
  Synthetic oligonucleotide
gccgggtgtcgtaggatggatcttctcacccactc

SEQ ID NO: 8776 - DNA, 36 bp, Artificial Sequence
  Synthetic oligonucleotide
gccgtccagcagagctcttaacgttgaggaaggcaa

SEQ ID NO: 8777 - DNA, 36 bp, Artificial Sequence
  Synthetic oligonucleotide
gcgacaaggaagacggataaagagtgcaattgggga

SEQ ID NO: 8778 - DNA, 35 bp, Artificial Sequence
  Synthetic oligonucleotide
gcgcaccccacagccaccatgaccgcctcgcccca

SEQ ID NO: 8779 - DNA, 35 bp, Artificial Sequence
  Synthetic oligonucleotide
ggacaaacgcacgatagagctctcacttgttcatg

SEQ ID NO: 8780 - DNA, 35 bp, Artificial Sequence
  Synthetic oligonucleotide
gtccgcacggaacacccagagttcggaagaggatc

SEQ ID NO: 8781 - DNA, 38 bp, Artificial Sequence
  Synthetic oligonucleotide
gttgcaaccaagcgggaagaagctagtacaagaagtga

SEQ ID NO: 8782 - DNA, 37 bp, Artificial Sequence
  Synthetic oligonucleotide
taccacgtgcttagggtattgccggctgaatcggaga

SEQ ID NO: 8783 - DNA, 37 bp, Artificial Sequence
  Synthetic oligonucleotide
tagccacggatgcggaagtccaggaaagtacgttaga

SEQ ID NO: 8784 - DNA, 35 bp, Artificial Sequence
  Synthetic oligonucleotide
tcaaatcgcacggagggaaacgggaggcacccacc

SEQ ID NO: 8785 - DNA, 36 bp, Artificial Sequence
  Synthetic oligonucleotide
tcaaccgcagatgggtcgcgcccaactggtttccaa

SEQ ID NO: 8786 - DNA, 36 bp, Artificial Sequence
  Synthetic oligonucleotide
tcaacgcccagctaagctaccagtggctgtacgaca

SEQ ID NO: 8787 - DNA, 36 bp, Artificial Sequence
  Synthetic oligonucleotide
tcacgacgtcgtgattcacctaaagctcaaaggtca

SEQ ID NO: 8788 - DNA, 36 bp, Artificial Sequence
  Synthetic oligonucleotide
tcgccgcattgacgtttctcatcgggcccggcttca

SEQ ID NO: 8789 - DNA, 35 bp, Artificial Sequence
  Synthetic oligonucleotide
tgaccgacagaaggcaaccacgcatgtcctgcaac

SEQ ID NO: 8790 - DNA, 35 bp, Artificial Sequence
  Synthetic oligonucleotide
tgaccgccggtcaaggtacgagttaggaaggttaa

SEQ ID NO: 8791 - DNA, 35 bp, Artificial Sequence
  Synthetic oligonucleotide
tgcccgaccccgtcgattgtgtatgtaggttgtaa

SEQ ID NO: 8792 - DNA, 36 bp, Artificial Sequence
  Synthetic oligonucleotide
tgtatctgcgggcaatttctcactgaccccgtatca

SEQ ID NO: 8793 - DNA, 35 bp, Artificial Sequence
  Synthetic oligonucleotide
ttggacacgtgccggtagtcataaacaggttttcc

SEQ ID NO: 8794 - DNA, 37 bp, Artificial Sequence
  Synthetic oligonucleotide
aaccatgcgccccctgaccccgtaaaaccgtttatga

SEQ ID NO: 8795 - DNA, 35 bp, Artificial Sequence
  Synthetic oligonucleotide
acacgcacccactttcaccatttcaacatgttggc

SEQ ID NO: 8796 - DNA, 37 bp, Artificial Sequence
  Synthetic oligonucleotide
acatcaacaggcgctgcaggtcgtccggcctaaagga

SEQ ID NO: 8797 - DNA, 36 bp, Artificial Sequence
  Synthetic oligonucleotide
accaccacgttatcgggatcgagtacgtttattata

SEQ ID NO: 8798 - DNA, 36 bp, Artificial Sequence
  Synthetic oligonucleotide
atcgaaacggtcgtcgctcccaagcctaatcctgaa

SEQ ID NO: 8799 - DNA, 36 bp, Artificial Sequence
  Synthetic oligonucleotide
gacacacgcggtttttaaaggtgagcattacctaat

SEQ ID NO: 8800 - DNA, 38 bp, Artificial Sequence
  Synthetic oligonucleotide
gacataacacgtagcggaggcggaaagaaacatactga

SEQ ID NO: 8801 - DNA, 37 bp, Artificial Sequence
  Synthetic oligonucleotide
gacgcgcataagaggtgtcttcactaccttcgacaga

SEQ ID NO: 8802 - DNA, 36 bp, Artificial Sequence
  Synthetic oligonucleotide
gacggttcgacacgaaaaacacagtcttacctatta

SEQ ID NO: 8803 - DNA, 37 bp, Artificial Sequence
  Synthetic oligonucleotide
gacgtacggccggtgcaagtagttgtcggtatctcga

SEQ ID NO: 8804 - DNA, 37 bp, Artificial Sequence
  Synthetic oligonucleotide
gatgcacagtgcagaagtctaggagcttatcaggtga

SEQ ID NO: 8805 - DNA, 35 bp, Artificial Sequence
  Synthetic oligonucleotide
gcaaccgcaacccgactgtgcatttagggcacatc

SEQ ID NO: 8806 - DNA, 35 bp, Artificial Sequence
  Synthetic oligonucleotide
gcgacattacgcacatgtgtacgcctcatctaatc

SEQ ID NO: 8807 - DNA, 38 bp, Artificial Sequence
  Synthetic oligonucleotide
gtgcacgggcaaacgtggaaagggatagtgtgacctga

SEQ ID NO: 8808 - DNA, 36 bp, Artificial Sequence
  Synthetic oligonucleotide
tagcccaataccatgagcgcacgcgtacagtagtca

SEQ ID NO: 8809 - DNA, 35 bp, Artificial Sequence
  Synthetic oligonucleotide
tcttattttagcaagatcttttatctaaatacaat

SEQ ID NO: 8810 - DNA, 37 bp, Artificial Sequence
  Synthetic oligonucleotide
tgacaggcaaggtgttgggcaatagactaggttgaga

SEQ ID NO: 8811 - DNA, 37 bp, Artificial Sequence
  Synthetic oligonucleotide
tgccaacaacagatctgcccatcaatacactttctga

SEQ ID NO: 8812 - DNA, 36 bp, Artificial Sequence
  Synthetic oligonucleotide
acacacgcagtccggatttgatctcgacatgaacga

SEQ ID NO: 8813 - DNA, 35 bp, Artificial Sequence
  Synthetic oligonucleotide
accgcgcccagacccgtctatccgtccacaccgcc

SEQ ID NO: 8814 - DNA, 35 bp, Artificial Sequence
  Synthetic oligonucleotide
acgcgaaggccaccggagacttaggtacctcggag

SEQ ID NO: 8815 - DNA, 38 bp, Artificial Sequence
  Synthetic oligonucleotide
atgcccgcgcagactctgaagtctgattttctagatga

SEQ ID NO: 8816 - DNA, 36 bp, Artificial Sequence
  Synthetic oligonucleotide
atgcgcccagcaacgatcctagtagagttacaaaca

SEQ ID NO: 8817 - DNA, 35 bp, Artificial Sequence
  Synthetic oligonucleotide
cacgcaaacgacctgccgctagtgattagaacatg

SEQ ID NO: 8818 - DNA, 36 bp, Artificial Sequence
  Synthetic oligonucleotide
gacagaggcaccgaaacaaacaccaacaaatggtga

SEQ ID NO: 8819 - DNA, 36 bp, Artificial Sequence
  Synthetic oligonucleotide
gacgtcgaaaacagtggcaacgatgtccgttccaca

SEQ ID NO: 8820 - DNA, 37 bp, Artificial Sequence
  Synthetic oligonucleotide
gagctcgcacagagactagtaaaaggcagaccataga

SEQ ID NO: 8821 - DNA, 35 bp, Artificial Sequence
  Synthetic oligonucleotide
gagtcgcgaaggagtgacgccccagcatttctacc

SEQ ID NO: 8822 - DNA, 36 bp, Artificial Sequence
  Synthetic oligonucleotide
gatcatggccgagaagcacaatggcgattgacggga

SEQ ID NO: 8823 - DNA, 38 bp, Artificial Sequence
  Synthetic oligonucleotide
gatgcccaccggtcgaattgtattggcgaccctgttga

SEQ ID NO: 8824 - DNA, 38 bp, Artificial Sequence
  Synthetic oligonucleotide
gatgtcgaagctggcgtgataaagtcataatttggtga

SEQ ID NO: 8825 - DNA, 35 bp, Artificial Sequence
  Synthetic oligonucleotide
gccaaacacatgcactgaaagggagtctggtccca

SEQ ID NO: 8826 - DNA, 36 bp, Artificial Sequence
  Synthetic oligonucleotide
ggaccccgatcggaccatgctgttacagtgcccaca

SEQ ID NO: 8827 - DNA, 35 bp, Artificial Sequence
  Synthetic oligonucleotide
tcaccaagtcgatcccgcacgatatagtaataacg

SEQ ID NO: 8828 - DNA, 36 bp, Artificial Sequence
  Synthetic oligonucleotide
tcacggagtcaagtctatgcataagcaataagcgta

SEQ ID NO: 8829 - DNA, 35 bp, Artificial Sequence
  Synthetic oligonucleotide
tctggagggcggaacgttacccgagagacggaggg

SEQ ID NO: 8830 - DNA, 36 bp, Artificial Sequence
  Synthetic oligonucleotide
tgacgccccgtgtataaatgctaagaactcgttgga

SEQ ID NO: 8831 - DNA, 38 bp, Artificial Sequence
  Synthetic oligonucleotide
tgacgctggacaagggaggtatcgggggacgcttctga

SEQ ID NO: 8832 - DNA, 37 bp, Artificial Sequence
  Synthetic oligonucleotide
aacacgcaggtgaacggtgcaatcttgtcatgggtga

SEQ ID NO: 8833 - DNA, 35 bp, Artificial Sequence
  Synthetic oligonucleotide
aaccacacacccaccgtcacgactgcgtgtcaagc

SEQ ID NO: 8834 - DNA, 36 bp, Artificial Sequence
  Synthetic oligonucleotide
aaccaccagccgtccaacgagcagaggccgacacta

SEQ ID NO: 8835 - DNA, 35 bp, Artificial Sequence
  Synthetic oligonucleotide
aacgcgcacatcagaggaatgctgatacgtctacg

SEQ ID NO: 8836 - DNA, 36 bp, Artificial Sequence
  Synthetic oligonucleotide
acaccggtaggtggtacaagtaaacacgggcggaga

SEQ ID NO: 8837 - DNA, 35 bp, Artificial Sequence
  Synthetic oligonucleotide
accacgaacgcggagtgaccgtgcctactacttaa

SEQ ID NO: 8838 - DNA, 35 bp, Artificial Sequence
  Synthetic oligonucleotide
accgcgccaagaacctgtaagttcgacgactgttc

SEQ ID NO: 8839 - DNA, 36 bp, Artificial Sequence
  Synthetic oligonucleotide
acgaccagtagcccttacgctgcaactttacgtgca

SEQ ID NO: 8840 - DNA, 36 bp, Artificial Sequence
  Synthetic oligonucleotide
agacccgacgtaacggactgagtatgcttactacaa

SEQ ID NO: 8841 - DNA, 37 bp, Artificial Sequence
  Synthetic oligonucleotide
atcaccccacaaatcacgaacgtggctattactcaga

SEQ ID NO: 8842 - DNA, 38 bp, Artificial Sequence
  Synthetic oligonucleotide
atgcacacgacaacaacgtgattttcgaacaatgctga

SEQ ID NO: 8843 - DNA, 35 bp, Artificial Sequence
  Synthetic oligonucleotide
gaacaaggcaaagtgcagattaagtagaacgcctt

SEQ ID NO: 8844 - DNA, 35 bp, Artificial Sequence
  Synthetic oligonucleotide
gaacacgcaccacacaccccttccatcgggactat

SEQ ID NO: 8845 - DNA, 36 bp, Artificial Sequence
  Synthetic oligonucleotide
gaaccccgcgcacacatggacagacacagtcattca

SEQ ID NO: 8846 - DNA, 35 bp, Artificial Sequence
  Synthetic oligonucleotide
gacaacggatccgaataaatcccaatttccgcggc

SEQ ID NO: 8847 - DNA, 36 bp, Artificial Sequence
  Synthetic oligonucleotide
gacgaacgctgacggtcctcttatggatctatcatg

SEQ ID NO: 8848 - DNA, 37 bp, Artificial Sequence
  Synthetic oligonucleotide
gagcaccgtgcggagtgatataggcgcacgtcctgga

SEQ ID NO: 8849 - DNA, 33 bp, Artificial Sequence
  Synthetic oligonucleotide
gagccactaaagtcaccccgcgtaaattccttg

SEQ ID NO: 8850 - DNA, 36 bp, Artificial Sequence
  Synthetic oligonucleotide
gatgccgagtaggacccgaaactcagacggacacca

SEQ ID NO: 8851 - DNA, 36 bp, Artificial Sequence
  Synthetic oligonucleotide
gcacacccgcaccgtttatcgcacgtagcatcgcca

SEQ ID NO: 8852 - DNA, 35 bp, Artificial Sequence
  Synthetic oligonucleotide
gccaggaccaccccgtatcaagcctcgctccagga

SEQ ID NO: 8853 - DNA, 37 bp, Artificial Sequence
  Synthetic oligonucleotide
gcgatcgcagaagacgctactcgcctttgccctcgga

SEQ ID NO: 8854 - DNA, 36 bp, Artificial Sequence
  Synthetic oligonucleotide
gctcacaatcacgtgatcctttccgacctatcttaa

SEQ ID NO: 8855 - DNA, 38 bp, Artificial Sequence
  Synthetic oligonucleotide
gctgccgaagatatcccagtgtactgacgactaggtga

SEQ ID NO: 8856 - DNA, 36 bp, Artificial Sequence
  Synthetic oligonucleotide
ggacacgcacgatttaataagggcactatccgcata

SEQ ID NO: 8857 - DNA, 35 bp, Artificial Sequence
  Synthetic oligonucleotide
ggacgggagtccgcggctttaaggtataggcggtg

SEQ ID NO: 8858 - DNA, 37 bp, Artificial Sequence
  Synthetic oligonucleotide
ggtgcaccgcaagcccgtgtatccgttagtaacctga

SEQ ID NO: 8859 - DNA, 35 bp, Artificial Sequence
  Synthetic oligonucleotide
gtgccatacaagatgaatccgtagtaccattgtag

SEQ ID NO: 8860 - DNA, 36 bp, Artificial Sequence
  Synthetic oligonucleotide
gtgctaccccagttgctaaacattgcagcctactta

SEQ ID NO: 8861 - DNA, 37 bp, Artificial Sequence
  Synthetic oligonucleotide
gtggtgcggactcagacaacatggcgggtggggggga

SEQ ID NO: 8862 - DNA, 36 bp, Artificial Sequence
  Synthetic oligonucleotide
tacatcgcggccaagctccacccttgtaacccagta

SEQ ID NO: 8863 - DNA, 38 bp, Artificial Sequence
  Synthetic oligonucleotide
tatgcgccacacaaccaggggacgtacatcgcctatga

SEQ ID NO: 8864 - DNA, 38 bp, Artificial Sequence
  Synthetic oligonucleotide
tgtccgagccgagattgtgtgaaggtgggcctcagtga

SEQ ID NO: 8865 - DNA, 37 bp, Artificial Sequence
  Synthetic oligonucleotide
aacaactgcgccatatcctagataatgtactctccga

SEQ ID NO: 8866 - DNA, 35 bp, Artificial Sequence
  Synthetic oligonucleotide
aacgccacggccttgatcgacgtactacgccttac

SEQ ID NO: 8867 - DNA, 35 bp, Artificial Sequence
  Synthetic oligonucleotide
acacacgccccattttctttacaacaacacgccca

SEQ ID NO: 8868 - DNA, 37 bp, Artificial Sequence
  Synthetic oligonucleotide
acagtccgagccaggtggactagccatcgatatcaga

SEQ ID NO: 8869 - DNA, 38 bp, Artificial Sequence
  Synthetic oligonucleotide
accgttgcaccagggttccatccgtatctcttcggtga

SEQ ID NO: 8870 - DNA, 36 bp, Artificial Sequence
  Synthetic oligonucleotide
actcacgaccgggcacgacgtctttccaccccagga

SEQ ID NO: 8871 - DNA, 35 bp, Artificial Sequence
  Synthetic oligonucleotide
atctgcgggcacacagatcagtgactgttgttctc

SEQ ID NO: 8872 - DNA, 36 bp, Artificial Sequence
  Synthetic oligonucleotide
gaaccatgcaaccaccgaatacccgacatcggctca

SEQ ID NO: 8873 - DNA, 35 bp, Artificial Sequence
  Synthetic oligonucleotide
gaacgaccagtgggtgcggatacgtagactggggt

SEQ ID NO: 8874 - DNA, 35 bp, Artificial Sequence
  Synthetic oligonucleotide
gaagcacccacggggggggagggaccatccactac

SEQ ID NO: 8875 - DNA, 35 bp, Artificial Sequence
  Synthetic oligonucleotide
gaatggccggagggcgtaacggggtcagtgggact

SEQ ID NO: 8876 - DNA, 37 bp, Artificial Sequence
  Synthetic oligonucleotide
gacaaccaaaggtgcaaaacaggaacttacgagtcga

SEQ ID NO: 8877 - DNA, 35 bp, Artificial Sequence
  Synthetic oligonucleotide
gacacgcacaggcttgtcaaggataacaccgtgtg

SEQ ID NO: 8878 - DNA, 37 bp, Artificial Sequence
  Synthetic oligonucleotide
gacgaatggggtataggtgaggccgtggagtgtatga

SEQ ID NO: 8879 - DNA, 36 bp, Artificial Sequence
  Synthetic oligonucleotide
gcaacccctgtgacataactgaccccgatgtgtgga

SEQ ID NO: 8880 - DNA, 35 bp, Artificial Sequence
  Synthetic oligonucleotide
gccaacgtacgcggaatggtgtcctgggtgaggtg

SEQ ID NO: 8881 - DNA, 38 bp, Artificial Sequence
  Synthetic oligonucleotide
gccgcctaccgaggcatctcacagttcagatagagtga

SEQ ID NO: 8882 - DNA, 36 bp, Artificial Sequence
  Synthetic oligonucleotide
gccgtagcgaagagtatcttcagctgtaccggagta

SEQ ID NO: 8883 - DNA, 35 bp, Artificial Sequence
  Synthetic oligonucleotide
gctgcccacgccttttcttttctgtaacaactttg

SEQ ID NO: 8884 - DNA, 36 bp, Artificial Sequence
  Synthetic oligonucleotide
gtcacgacagggtgtgtggtcgttccaactaacgta

SEQ ID NO: 8885 - DNA, 36 bp, Artificial Sequence
  Synthetic oligonucleotide
gtgccaagcgcaacgagaaacccggcgtctgctcta

SEQ ID NO: 8886 - DNA, 36 bp, Artificial Sequence
  Synthetic oligonucleotide
gtgggccgaagacgtattggagacaagggttaacga

SEQ ID NO: 8887 - DNA, 35 bp, Artificial Sequence
  Synthetic oligonucleotide
gtgtcgcacacacggacggtacctggacggatcta

SEQ ID NO: 8888 - DNA, 36 bp, Artificial Sequence
  Synthetic oligonucleotide
taagacgcggccatcattgcgaccagaatacccgaa

SEQ ID NO: 8889 - DNA, 36 bp, Artificial Sequence
  Synthetic oligonucleotide
tacaacgcggctgtagtacattgccccgatattatg

SEQ ID NO: 8890 - DNA, 35 bp, Artificial Sequence
  Synthetic oligonucleotide
taccgcgcaccgcaatagagatcttatccttgact

SEQ ID NO: 8891 - DNA, 36 bp, Artificial Sequence
  Synthetic oligonucleotide
tacgtcccgcacatgtgacccaaggaccttcaacga

SEQ ID NO: 8892 - DNA, 38 bp, Artificial Sequence
  Synthetic oligonucleotide
tcacgccacaggacaaagactcttaccgtctctactga

SEQ ID NO: 8893 - DNA, 37 bp, Artificial Sequence
  Synthetic oligonucleotide
tccaacagcaggcacatgatcctaacccacagacaga

SEQ ID NO: 8894 - DNA, 35 bp, Artificial Sequence
  Synthetic oligonucleotide
tgcgagcaggacccaacatccgtcgtgcgcatcag

SEQ ID NO: 8895 - DNA, 36 bp, Artificial Sequence
  Synthetic oligonucleotide
tgcgggagcaacgaggctaatactgttgaactgcaa

SEQ ID NO: 8896 - DNA, 36 bp, Artificial Sequence
  Synthetic oligonucleotide
aacccgctgccacccgcgcattatcagagtaggtta

SEQ ID NO: 8897 - DNA, 34 bp, Artificial Sequence
  Synthetic oligonucleotide
aactgggggacgacgggtgggtgggcaatacttg

SEQ ID NO: 8898 - DNA, 35 bp, Artificial Sequence
  Synthetic oligonucleotide
accaaccacaccctcatcgctatacccagtgcact

SEQ ID NO: 8899 - DNA, 37 bp, Artificial Sequence
  Synthetic oligonucleotide
agtcacatggggatgcgatataagcggatacgcctga

SEQ ID NO: 8900 - DNA, 35 bp, Artificial Sequence
  Synthetic oligonucleotide
atcacgcaaggtgtactcggccagttcgacaaacg

SEQ ID NO: 8901 - DNA, 36 bp, Artificial Sequence
  Synthetic oligonucleotide
atccaacgcagtcatgaagcacataccggcatcgca

SEQ ID NO: 8902 - DNA, 37 bp, Artificial Sequence
  Synthetic oligonucleotide
atgcgaagcaagtaccaccgcaggtacggacgaacga

SEQ ID NO: 8903 - DNA, 38 bp, Artificial Sequence
  Synthetic oligonucleotide
atgcttccgtccagccacctgaccccgctacacaatga

SEQ ID NO: 8904 - DNA, 36 bp, Artificial Sequence
  Synthetic oligonucleotide
catccattccggcgctgtgacgtcgctggtcatgca

SEQ ID NO: 8905 - DNA, 35 bp, Artificial Sequence
  Synthetic oligonucleotide
gacaggagccacgcaccattcgcgatagattcggg

SEQ ID NO: 8906 - DNA, 35 bp, Artificial Sequence
  Synthetic oligonucleotide
gacgaaacgcgaggcaaggtgcggggagacacgta

SEQ ID NO: 8907 - DNA, 38 bp, Artificial Sequence
  Synthetic oligonucleotide
gacgacttgtggggcggaacagtactgcagggtactga

SEQ ID NO: 8908 - DNA, 36 bp, Artificial Sequence
  Synthetic oligonucleotide
gacgcacagaggaacgaggggacgtaagcaagttga

SEQ ID NO: 8909 - DNA, 36 bp, Artificial Sequence
  Synthetic oligonucleotide
gacgcatgcattactcggacggaaataggaagtaca

SEQ ID NO: 8910 - DNA, 35 bp, Artificial Sequence
  Synthetic oligonucleotide
gactaggccagaccctgaaagagtcttgcggaatc

SEQ ID NO: 8911 - DNA, 35 bp, Artificial Sequence
  Synthetic oligonucleotide
gagccaacgtacgctgccccaatcgttaatcatcg

SEQ ID NO: 8912 - DNA, 37 bp, Artificial Sequence
  Synthetic oligonucleotide
gcacgaaccccaactactgaccccgcctcgaaccggt

SEQ ID NO: 8913 - DNA, 37 bp, Artificial Sequence
  Synthetic oligonucleotide
gcagacgacgcgacgggtgtccgatacccgttaagga

SEQ ID NO: 8914 - DNA, 36 bp, Artificial Sequence
  Synthetic oligonucleotide
gctgacaccgtactcgtagtgcatcccaatccttca

SEQ ID NO: 8915 - DNA, 38 bp, Artificial Sequence
  Synthetic oligonucleotide
ggtgccggtgggtcgtcttcaattcgcagtctatttga

SEQ ID NO: 8916 - DNA, 35 bp, Artificial Sequence
  Synthetic oligonucleotide
gtgcggaggcacacagcctaggttcaaaattcggt

SEQ ID NO: 8917 - DNA, 35 bp, Artificial Sequence
  Synthetic oligonucleotide
tcacaaccgcagtgacggtaaagcgttactgttcc

SEQ ID NO: 8918 - DNA, 35 bp, Artificial Sequence
  Synthetic oligonucleotide
tcacaaccgccgcaatctgcctccagggacagctc

SEQ ID NO: 8919 - DNA, 36 bp, Artificial Sequence
  Synthetic oligonucleotide
tccatccccgcatcaggcgcactgaccccgttgtca

SEQ ID NO: 8920 - DNA, 36 bp, Artificial Sequence
  Synthetic oligonucleotide
tccgtgcgggctttctctcaacgggccgggcagtca

SEQ ID NO: 8921 - DNA, 35 bp, Artificial Sequence
  Synthetic oligonucleotide
tgacaactggccattaactgataacacataggggg

SEQ ID NO: 8922 - DNA, 36 bp, Artificial Sequence
  Synthetic oligonucleotide
tgacggagcagtgcaggggggtggtgactggtgaca

SEQ ID NO: 8923 - DNA, 38 bp, Artificial Sequence
  Synthetic oligonucleotide
tgaggaagcaccaagtgagcattgcaaacccctaatga

SEQ ID NO: 8924 - DNA, 36 bp, Artificial Sequence
  Synthetic oligonucleotide
tgtggagggcacgctgggggaaaggacggcatttaa

SEQ ID NO: 8925 - DNA, 35 bp, Artificial Sequence
  Synthetic oligonucleotide
ttgactgaccccgccccatcgactccatagcatag

SEQ ID NO: 8926 - DNA, 36 bp, Artificial Sequence
  Synthetic oligonucleotide
aacaacgtcgacgtctaacctccacctgttttacaa

SEQ ID NO: 8927 - DNA, 35 bp, Artificial Sequence
  Synthetic oligonucleotide
aacacgcggtcgactgttgtcctagaaagcttatg

SEQ ID NO: 8928 - DNA, 35 bp, Artificial Sequence
  Synthetic oligonucleotide
aacgcccagaaaggcatgcctgtacgtcaaaccgc

SEQ ID NO: 8929 - DNA, 37 bp, Artificial Sequence
  Synthetic oligonucleotide
acacacgtccgcttaggcataactaactacagtaaga

SEQ ID NO: 8930 - DNA, 37 bp, Artificial Sequence
  Synthetic oligonucleotide
acataccgacgcaaattcgtgtcggtggagtcgagga

SEQ ID NO: 8931 - DNA, 36 bp, Artificial Sequence
  Synthetic oligonucleotide
accacatagccggtattacaacgtacagtggagcta

SEQ ID NO: 8932 - DNA, 35 bp, Artificial Sequence
  Synthetic oligonucleotide
actccgcaaggagtactaagacgggcagaaagggg

SEQ ID NO: 8933 - DNA, 38 bp, Artificial Sequence
  Synthetic oligonucleotide
atgacccagtacaaaggcttacagtcggaactgtgtga

SEQ ID NO: 8934 - DNA, 36 bp, Artificial Sequence
  Synthetic oligonucleotide
cagcgcggcatgtgtctgatacgatcgcagtgctta

SEQ ID NO: 8935 - DNA, 38 bp, Artificial Sequence
  Synthetic oligonucleotide
cctgcacgacgaaggtatcgtaggcacaatttcattga

SEQ ID NO: 8936 - DNA, 37 bp, Artificial Sequence
  Synthetic oligonucleotide
gaccgcgatccggaacagtaatttacaggctgtacga

SEQ ID NO: 8937 - DNA, 37 bp, Artificial Sequence
  Synthetic oligonucleotide
gacgaccaacgcatcggtgaaagtagaggcaatagga

SEQ ID NO: 8938 - DNA, 36 bp, Artificial Sequence
  Synthetic oligonucleotide
gagacacccgtcctcagagtaaaccgtttagccgca

SEQ ID NO: 8939 - DNA, 38 bp, Artificial Sequence
  Synthetic oligonucleotide
gaggacaatggccaatcgtctttgctagtaggtgctga

SEQ ID NO: 8940 - DNA, 37 bp, Artificial Sequence
  Synthetic oligonucleotide
gcacgaaggcgcctctacatcgcaactgaacggtgga

SEQ ID NO: 8941 - DNA, 36 bp, Artificial Sequence
  Synthetic oligonucleotide
gcatgccccatagatacaccctcgcgttattcggca

SEQ ID NO: 8942 - DNA, 35 bp, Artificial Sequence
  Synthetic oligonucleotide
gccaaaaggcaaaggcgggaccagatgtcactttt

SEQ ID NO: 8943 - DNA, 36 bp, Artificial Sequence
  Synthetic oligonucleotide
gccgatcaggcatggcggggacaggtataattccga

SEQ ID NO: 8944 - DNA, 35 bp, Artificial Sequence
  Synthetic oligonucleotide
gctgcctaaacgttgcatgcgtcctaaagacctgg

SEQ ID NO: 8945 - DNA, 35 bp, Artificial Sequence
  Synthetic oligonucleotide
gtcccaacacccaagtacagctgacgatgtacaca

SEQ ID NO: 8946 - DNA, 36 bp, Artificial Sequence
  Synthetic oligonucleotide
gtgaccggacctcagagtagtagaacacacaacgca

SEQ ID NO: 8947 - DNA, 35 bp, Artificial Sequence
  Synthetic oligonucleotide
tcaaccgccacaactcccaacggacttcagcactt

SEQ ID NO: 8948 - DNA, 38 bp, Artificial Sequence
  Synthetic oligonucleotide
tcacaccatcagtggtcatcaaggagccaacggtgtga

SEQ ID NO: 8949 - DNA, 36 bp, Artificial Sequence
  Synthetic oligonucleotide
tcacagcaggcaccgacgacctacacatattctcaa

SEQ ID NO: 8950 - DNA, 36 bp, Artificial Sequence
  Synthetic oligonucleotide
aacacacccatcgctcgtgtaacacacacacccaaa

SEQ ID NO: 8951 - DNA, 36 bp, Artificial Sequence
  Synthetic oligonucleotide
aacacccgtcccaacacgatcgatccgtacattcga

SEQ ID NO: 8952 - DNA, 38 bp, Artificial Sequence
  Synthetic oligonucleotide
aacacgccactgcctacaagacggtcgtaattgcatga

SEQ ID NO: 8953 - DNA, 36 bp, Artificial Sequence
  Synthetic oligonucleotide
aacgcgacgagcctgcgcaatgagtcaccgctagca

SEQ ID NO: 8954 - DNA, 37 bp, Artificial Sequence
  Synthetic oligonucleotide
acacagccggggaggctgcttatcgtgggagggttga

SEQ ID NO: 8955 - DNA, 36 bp, Artificial Sequence
  Synthetic oligonucleotide
acaccgcagacgctggtagcaaaaatcactcgatca

SEQ ID NO: 8956 - DNA, 36 bp, Artificial Sequence
  Synthetic oligonucleotide
acgatccagaagcaggccaaggctcgttgacacgta

SEQ ID NO: 8957 - DNA, 36 bp, Artificial Sequence
  Synthetic oligonucleotide
atcacgcggccatctgactcatgaaggctactcgta

SEQ ID NO: 8958 - DNA, 38 bp, Artificial Sequence
  Synthetic oligonucleotide
atcgccgaggagttcgagggtgttgggacttgggatga

SEQ ID NO: 8959 - DNA, 36 bp, Artificial Sequence
  Synthetic oligonucleotide
gaatgcaacatccagaccccgcaccattcaaatcca

SEQ ID NO: 8960 - DNA, 36 bp, Artificial Sequence
  Synthetic oligonucleotide
gacgcgctgtttcaaaaggacagaatgttgtttcta

SEQ ID NO: 8961 - DNA, 38 bp, Artificial Sequence
  Synthetic oligonucleotide
gatgagtccgcaacgtgttccccccagcgcaccattga

SEQ ID NO: 8962 - DNA, 35 bp, Artificial Sequence
  Synthetic oligonucleotide
gatgcgcagcagcacgtcactcttgtgagtgcatt

SEQ ID NO: 8963 - DNA, 37 bp, Artificial Sequence
  Synthetic oligonucleotide
gcaagaggcacaacagagtcatctagtataccgcaga

SEQ ID NO: 8964 - DNA, 36 bp, Artificial Sequence
  Synthetic oligonucleotide
gcacaacctcacatgaccacaacgagacgtcaggta

SEQ ID NO: 8965 - DNA, 35 bp, Artificial Sequence
  Synthetic oligonucleotide
gcaccccagtgcctaatcaacgaactgcttctgtc

SEQ ID NO: 8966 - DNA, 35 bp, Artificial Sequence
  Synthetic oligonucleotide
gccacacgccaacctcttttacaggtccctgtttc

SEQ ID NO: 8967 - DNA, 35 bp, Artificial Sequence
  Synthetic oligonucleotide
gcccggaccacgttacagacccccagactcgtgag

SEQ ID NO: 8968 - DNA, 37 bp, Artificial Sequence
  Synthetic oligonucleotide
gcgtggtgcagatcagtaatatcggtgcgcattcgga

SEQ ID NO: 8969 - DNA, 38 bp, Artificial Sequence
  Synthetic oligonucleotide
gtcaccaccacgagttattcagtatccatgaagcatga

SEQ ID NO: 8970 - DNA, 36 bp, Artificial Sequence
  Synthetic oligonucleotide
gtgagacgagcgatggggtccgtgcaaaatattcga

SEQ ID NO: 8971 - DNA, 35 bp, Artificial Sequence
  Synthetic oligonucleotide
gtgggcgcaccagtgaattgaagcgcgttgtacct

SEQ ID NO: 8972 - DNA, 36 bp, Artificial Sequence
  Synthetic oligonucleotide
tacccgaggcagtagtgtggccgggtgaggtgcaaa

SEQ ID NO: 8973 - DNA, 36 bp, Artificial Sequence
  Synthetic oligonucleotide
tcaccccagtgatgtacgtcgccttgtggttccgaa

SEQ ID NO: 8974 - DNA, 37 bp, Artificial Sequence
  Synthetic oligonucleotide
tcctggcgggtcgtgccggatgtcacatcgatattga

SEQ ID NO: 8975 - DNA, 35 bp, Artificial Sequence
  Synthetic oligonucleotide
tgagcccaggagatacgtgacttagttttatcaat

SEQ ID NO: 8976 - DNA, 35 bp, Artificial Sequence
  Synthetic oligonucleotide
tgcacctggcgtctaaccactgaccctgtttcttc

SEQ ID NO: 8977 - DNA, 32 bp, Artificial Sequence
  Synthetic oligonucleotide
aacacaggcgcgccacacatgatggaatcgta

SEQ ID NO: 8978 - DNA, 38 bp, Artificial Sequence
  Synthetic oligonucleotide
aacaccaagggaccgtcgcagtccaaggcgacagctga

SEQ ID NO: 8979 - DNA, 35 bp, Artificial Sequence
  Synthetic oligonucleotide
aaccctgccgcctgtaaacgtaggtcgcgctaggc

SEQ ID NO: 8980 - DNA, 38 bp, Artificial Sequence
  Synthetic oligonucleotide
acacccgtagtagcctccagagtcatagccgtaattga

SEQ ID NO: 8981 - DNA, 36 bp, Artificial Sequence
  Synthetic oligonucleotide
accgccgggcaaaacgtgcattaatcgacgtcgcca

SEQ ID NO: 8982 - DNA, 38 bp, Artificial Sequence
  Synthetic oligonucleotide
acctaccacgaggcaaagacagtgtcttctatgggtga

SEQ ID NO: 8983 - DNA, 36 bp, Artificial Sequence
  Synthetic oligonucleotide
agcgatgccaagcaggaacaagaccgtggggggaaa

SEQ ID NO: 8984 - DNA, 36 bp, Artificial Sequence
  Synthetic oligonucleotide
atgcgggcaacaacaacctcaaaagagtcgaatcga

SEQ ID NO: 8985 - DNA, 37 bp, Artificial Sequence
  Synthetic oligonucleotide
cgagtcggttggtgcgtatctctcgtgaccagggaga

SEQ ID NO: 8986 - DNA, 36 bp, Artificial Sequence
  Synthetic oligonucleotide
gaaacggacgggcatgagaatgtttcgtatcctaaa

SEQ ID NO: 8987 - DNA, 37 bp, Artificial Sequence
  Synthetic oligonucleotide
gacacacacctgtcgtgactagtcaacacccatctga

SEQ ID NO: 8988 - DNA, 36 bp, Artificial Sequence
  Synthetic oligonucleotide
gatcccgatgccgtccatatctcgtcagcactatga

SEQ ID NO: 8989 - DNA, 36 bp, Artificial Sequence
  Synthetic oligonucleotide
gcatcactgtctaaccctgcattccaaaccccgcta

SEQ ID NO: 8990 - DNA, 35 bp, Artificial Sequence
  Synthetic oligonucleotide
gccaacgtacgccggtcgtctcaattacgctgatt

SEQ ID NO: 8991 - DNA, 38 bp, Artificial Sequence
  Synthetic oligonucleotide
gccggaccacgtaacggaggctgtaagcttaagcgtga

SEQ ID NO: 8992 - DNA, 37 bp, Artificial Sequence
  Synthetic oligonucleotide
gcgacgaacagaagaggtttaacgtggcaagaatcga

SEQ ID NO: 8993 - DNA, 34 bp, Artificial Sequence
  Synthetic oligonucleotide
gctgcctgacgccgaagtggttatcaaaataagt

SEQ ID NO: 8994 - DNA, 38 bp, Artificial Sequence
  Synthetic oligonucleotide
gtgatgcgtgcgcctaccaagaaccgcccctgatttga

SEQ ID NO: 8995 - DNA, 35 bp, Artificial Sequence
  Synthetic oligonucleotide
gtgcgggggtgggattcttttgggtggggctaaac

SEQ ID NO: 8996 - DNA, 34 bp, Artificial Sequence
  Synthetic oligonucleotide
taactaccacaccgctgaagaccgtccaggatgg

SEQ ID NO: 8997 - DNA, 35 bp, Artificial Sequence
  Synthetic oligonucleotide
tacacgcgatcaaatactacaccaaaggctagtac

SEQ ID NO: 8998 - DNA, 38 bp, Artificial Sequence
  Synthetic oligonucleotide
tccaacccgccattctctcgacttagcaatctcactga

SEQ ID NO: 8999 - DNA, 36 bp, Artificial Sequence
  Synthetic oligonucleotide
tgcacccacgtagtgcaccactgaccccgatattaa

SEQ ID NO: 9000 - DNA, 35 bp, Artificial Sequence
  Synthetic oligonucleotide
aacactgctaactgtatgacgacgaatcagatatg

SEQ ID NO: 9001 - DNA, 36 bp, Artificial Sequence
  Synthetic oligonucleotide
acaccgagtccaatataccgcaagttgtgctcatca

SEQ ID NO: 9002 - DNA, 36 bp, Artificial Sequence
  Synthetic oligonucleotide
acacgccacgtgagagagcaaaaccgtactccccaa

SEQ ID NO: 9003 - DNA, 37 bp, Artificial Sequence
  Synthetic oligonucleotide
accactcgcatagtcatgtgctccgacgtttttcgga

SEQ ID NO: 9004 - DNA, 36 bp, Artificial Sequence
  Synthetic oligonucleotide
acctgcccgaactctaccgctctgcagtctgtcgga

SEQ ID NO: 9005 - DNA, 38 bp, Artificial Sequence
  Synthetic oligonucleotide
agcgacgtgtcgcgaagtatgcatggaggaggctatga

SEQ ID NO: 9006 - DNA, 37 bp, Artificial Sequence
  Synthetic oligonucleotide
agtgccccagtactagtacgcgccaactccaatgaga

SEQ ID NO: 9007 - DNA, 37 bp, Artificial Sequence
  Synthetic oligonucleotide
atcgaacgctggcagtgagtttacttaatccgttgga

SEQ ID NO: 9008 - DNA, 38 bp, Artificial Sequence
  Synthetic oligonucleotide
gaagccggtgacggatgtcaagtactgtcgtgtgctga

SEQ ID NO: 9009 - DNA, 38 bp, Artificial Sequence
  Synthetic oligonucleotide
gacaggaagcacgtctaaggcacacctcaaaatactga

SEQ ID NO: 9010 - DNA, 37 bp, Artificial Sequence
  Synthetic oligonucleotide
gacccacgcaactgacatctgtgacatgaacggagga

SEQ ID NO: 9011 - DNA, 35 bp, Artificial Sequence
  Synthetic oligonucleotide
gacgagtgccagttatgtgatttaggcgactgttc

SEQ ID NO: 9012 - DNA, 35 bp, Artificial Sequence
  Synthetic oligonucleotide
gactgacatcagccacgccctaacgcagaatgctt

SEQ ID NO: 9013 - DNA, 36 bp, Artificial Sequence
  Synthetic oligonucleotide
gatacgccccagacatgacacgtgagatgcatcgaa

SEQ ID NO: 9014 - DNA, 35 bp, Artificial Sequence
  Synthetic oligonucleotide
gcaccactaggtgttgagtctaaccgtacaccact

SEQ ID NO: 9015 - DNA, 38 bp, Artificial Sequence
  Synthetic oligonucleotide
gccacgctgagggcaaggacgatagcgggatgccttga

SEQ ID NO: 9016 - DNA, 36 bp, Artificial Sequence
  Synthetic oligonucleotide
gccgatggtaagtcagacccccagacagaacgggga

SEQ ID NO: 9017 - DNA, 35 bp, Artificial Sequence
  Synthetic oligonucleotide
gccgcacaggccgtctggtcctcgtcccaccacta

SEQ ID NO: 9018 - DNA, 35 bp, Artificial Sequence
  Synthetic oligonucleotide
ggacccacgcagacacctactactaagccgtgcct

SEQ ID NO: 9019 - DNA, 38 bp, Artificial Sequence
  Synthetic oligonucleotide
gtgaccgccaagttcaggtaagcatgtagtcgtactga

SEQ ID NO: 9020 - DNA, 37 bp, Artificial Sequence
  Synthetic oligonucleotide
gtgcgaacccaggcttgtattcgtacgttattcccga

SEQ ID NO: 9021 - DNA, 38 bp, Artificial Sequence
  Synthetic oligonucleotide
gtggaacgacaaacaaacgggccccatgtcgctactga

SEQ ID NO: 9022 - DNA, 35 bp, Artificial Sequence
  Synthetic oligonucleotide
taccagtcggacatatcgatacagaaaatggtaag

SEQ ID NO: 9023 - DNA, 37 bp, Artificial Sequence
  Synthetic oligonucleotide
tatgcgcggggcttaacgcggaggacttaggctctga

SEQ ID NO: 9024 - DNA, 36 bp, Artificial Sequence
  Synthetic oligonucleotide
tatggcacaggcaacccggcaacggacgcaaaggaa

SEQ ID NO: 9025 - DNA, 35 bp, Artificial Sequence
  Synthetic oligonucleotide
tgacgcacaagttgtacaaagggctgaacaaacaa

SEQ ID NO: 9026 - DNA, 35 bp, Artificial Sequence
  Synthetic oligonucleotide
tgggggcgagaccaggggacctgctggtttgatcg

SEQ ID NO: 9027 - DNA, 35 bp, Artificial Sequence
  Synthetic oligonucleotide
tgtgggagcaataacacgacactatcgctgctagc

SEQ ID NO: 9028 - DNA, 38 bp, Artificial Sequence
  Synthetic oligonucleotide
ttcaacgcaggctcgtcttgtgcgacataatgtgtgga

SEQ ID NO: 9029 - DNA, 37 bp, Artificial Sequence
  Synthetic oligonucleotide
aacatgccgaactgaccccgccatacttcgattaaaa

SEQ ID NO: 9030 - DNA, 37 bp, Artificial Sequence
  Synthetic oligonucleotide
acacgcgggcagatggctaccacggtgatagtactga

SEQ ID NO: 9031 - DNA, 38 bp, Artificial Sequence
  Synthetic oligonucleotide
acaggcgcaagccaatcgcgtctccgtgacggtggtga

SEQ ID NO: 9032 - DNA, 35 bp, Artificial Sequence
  Synthetic oligonucleotide
acatcccacgcatcttgcacacataagaacgttgc

SEQ ID NO: 9033 - DNA, 37 bp, Artificial Sequence
  Synthetic oligonucleotide
acatgccacaagatgtagaagatcgacgcgacatcga

SEQ ID NO: 9034 - DNA, 38 bp, Artificial Sequence
  Synthetic oligonucleotide
accgagctgcaggccaccgttcccgactagtctcctga

SEQ ID NO: 9035 - DNA, 37 bp, Artificial Sequence
  Synthetic oligonucleotide
acgtgtagccaccaactcggtaagaaagtacggtaga

SEQ ID NO: 9036 - DNA, 36 bp, Artificial Sequence
  Synthetic oligonucleotide
agcgacaagcgggtactgtggcgcgaccccgtagta

SEQ ID NO: 9037 - DNA, 38 bp, Artificial Sequence
  Synthetic oligonucleotide
ctacgcgctaatgtcagacgtaactacatacagactga

SEQ ID NO: 9038 - DNA, 36 bp, Artificial Sequence
  Synthetic oligonucleotide
gaccgggcacagagaggtaaagatgattagtaggga

SEQ ID NO: 9039 - DNA, 38 bp, Artificial Sequence
  Synthetic oligonucleotide
gagccgaaagggtgggttggctcagtaatagttactga

SEQ ID NO: 9040 - DNA, 35 bp, Artificial Sequence
  Synthetic oligonucleotide
gatgcgcctcgaggaagagggggaggacactataa

SEQ ID NO: 9041 - DNA, 36 bp, Artificial Sequence
  Synthetic oligonucleotide
gcaaacgggcaataaaccgacacacaccagtgtgga

SEQ ID NO: 9042 - DNA, 35 bp, Artificial Sequence
  Synthetic oligonucleotide
gcgaagcacccgacggaatttgtgcaaacgacgta

SEQ ID NO: 9043 - DNA, 36 bp, Artificial Sequence
  Synthetic oligonucleotide
gcgaggcaaagtttcgatgtaggaacagacggggga

SEQ ID NO: 9044 - DNA, 35 bp, Artificial Sequence
  Synthetic oligonucleotide
gcgatagccgctggcgtacaaaagaaatgcgtgat

SEQ ID NO: 9045 - DNA, 37 bp, Artificial Sequence
  Synthetic oligonucleotide
gctcgccacagtcgtgatttgagttcagaatactcga

SEQ ID NO: 9046 - DNA, 36 bp, Artificial Sequence
  Synthetic oligonucleotide
gtaggggcccgcaccacagcacattactgaagttca

SEQ ID NO: 9047 - DNA, 38 bp, Artificial Sequence
  Synthetic oligonucleotide
gtcaagccatcagttgagggtaccactaaccttcatga

SEQ ID NO: 9048 - DNA, 38 bp, Artificial Sequence
  Synthetic oligonucleotide
gtccaccccaaagcgttcttagactatcctaaatatga

SEQ ID NO: 9049 - DNA, 36 bp, Artificial Sequence
  Synthetic oligonucleotide
gtccacgccctgaatgagttgcttactggacatgga

SEQ ID NO: 9050 - DNA, 35 bp, Artificial Sequence
  Synthetic oligonucleotide
gtccacgggccgatcgtacgtgttaatgcctatac

SEQ ID NO: 9051 - DNA, 36 bp, Artificial Sequence
  Synthetic oligonucleotide
gtgggcaccactgcattaaggcccgtgagtatggta

SEQ ID NO: 9052 - DNA, 38 bp, Artificial Sequence
  Synthetic oligonucleotide
gtggggccacagtcaagcgagctcagctacggagctga

SEQ ID NO: 9053 - DNA, 37 bp, Artificial Sequence
  Synthetic oligonucleotide
taacacagccgatgtctcaaggcaacaaaacgtgaga

SEQ ID NO: 9054 - DNA, 35 bp, Artificial Sequence
  Synthetic oligonucleotide
tacgcatcggacgtgctgagtagctcttactccgt

SEQ ID NO: 9055 - DNA, 38 bp, Artificial Sequence
  Synthetic oligonucleotide
tagtgcgccggggggtaccaattcatgctgaccattga

SEQ ID NO: 9056 - DNA, 38 bp, Artificial Sequence
  Synthetic oligonucleotide
tcaacaacaggccatgcatgatgcgccatactagttga

SEQ ID NO: 9057 - DNA, 35 bp, Artificial Sequence
  Synthetic oligonucleotide
tcaaccagttcgcctgcaacatgacgatattgaat

SEQ ID NO: 9058 - DNA, 37 bp, Artificial Sequence
  Synthetic oligonucleotide
tcacgcacaaagcggggagggacaccaccttttgtga

SEQ ID NO: 9059 - DNA, 36 bp, Artificial Sequence
  Synthetic oligonucleotide
tgagcaccccagaacattattgaaggtcagttggga

SEQ ID NO: 9060 - DNA, 37 bp, Artificial Sequence
  Synthetic oligonucleotide
tgtgacgtaacatgagcgctgagtggtccgtggtgga

SEQ ID NO: 9061 - DNA, 37 bp, Artificial Sequence
  Synthetic oligonucleotide
aacaccgcacaacatgtggttagagtcggttagtgga

SEQ ID NO: 9062 - DNA, 36 bp, Artificial Sequence
  Synthetic oligonucleotide
aatgccgggcggttcaaattcgagacgttcggtgga

SEQ ID NO: 9063 - DNA, 36 bp, Artificial Sequence
  Synthetic oligonucleotide
acaccgagtcagactcggtatgagctcgctaacaga

SEQ ID NO: 9064 - DNA, 36 bp, Artificial Sequence
  Synthetic oligonucleotide
agcccccgccggacaacagtgattggtactcaggaa

SEQ ID NO: 9065 - DNA, 36 bp, Artificial Sequence
  Synthetic oligonucleotide
agcgagtccgtagtcccatggcaggataattaataa

SEQ ID NO: 9066 - DNA, 36 bp, Artificial Sequence
  Synthetic oligonucleotide
atctccccagagatccagcactgccgtgtcccaaaa

SEQ ID NO: 9067 - DNA, 35 bp, Artificial Sequence
  Synthetic oligonucleotide
atgccgggccgtaagtagtcatccgatctttaatg

SEQ ID NO: 9068 - DNA, 35 bp, Artificial Sequence
  Synthetic oligonucleotide
atggcgcaaagacccccgacggttcgccggtgcaa

SEQ ID NO: 9069 - DNA, 36 bp, Artificial Sequence
  Synthetic oligonucleotide
gacacgaccaacggtatgcgagtcatgactcataca

SEQ ID NO: 9070 - DNA, 37 bp, Artificial Sequence
  Synthetic oligonucleotide
gacagggcggaggaatgagggcccttcattgttctga

SEQ ID NO: 9071 - DNA, 38 bp, Artificial Sequence
  Synthetic oligonucleotide
gagccaatgcagcatcggccattcacgttccggattga

SEQ ID NO: 9072 - DNA, 38 bp, Artificial Sequence
  Synthetic oligonucleotide
gcaaacctcaaacgggcttaaacaatcgacgcaactga

SEQ ID NO: 9073 - DNA, 36 bp, Artificial Sequence
  Synthetic oligonucleotide
gcactgacgcatcgatgtaagggagaaccctcacga

SEQ ID NO: 9074 - DNA, 35 bp, Artificial Sequence
  Synthetic oligonucleotide
gccgtgaggccgacgcggtcatgaaccagtttcct

SEQ ID NO: 9075 - DNA, 38 bp, Artificial Sequence
  Synthetic oligonucleotide
gctgatacagcacatgagatcggcaagacgagaactga

SEQ ID NO: 9076 - DNA, 35 bp, Artificial Sequence
  Synthetic oligonucleotide
gtggtcgggggtgcatttgacggagcacactaatc

SEQ ID NO: 9077 - DNA, 38 bp, Artificial Sequence
  Synthetic oligonucleotide
tacacgacgagggattacgaccgctgaaaagagcatga

SEQ ID NO: 9078 - DNA, 36 bp, Artificial Sequence
  Synthetic oligonucleotide
tacgaggccgatgaatccaagatctgttagcggtga

SEQ ID NO: 9079 - DNA, 36 bp, Artificial Sequence
  Synthetic oligonucleotide
tcaacgggatggcggaatgcggaacgaatcgcttaa

SEQ ID NO: 9080 - DNA, 36 bp, Artificial Sequence
  Synthetic oligonucleotide
tcacaaccgtggtgtgggcccaatcagttaatcgca

SEQ ID NO: 9081 - DNA, 36 bp, Artificial Sequence
  Synthetic oligonucleotide
tgcgaaccgcagactggtcgtcatacattagcgtta

SEQ ID NO: 9082 - DNA, 36 bp, Artificial Sequence
  Synthetic oligonucleotide
tgtgtcgcgacatccttactgcattttcctccgtca

SEQ ID NO: 9083 - DNA, 37 bp, Artificial Sequence
  Synthetic oligonucleotide
ttgcccagccaagggagctatcgatggtcaactgaga

SEQ ID NO: 9084 - DNA, 38 bp, Artificial Sequence
  Synthetic oligonucleotide
aaccaacgggatgagtattggaggaggtaaatgcttga

SEQ ID NO: 9085 - DNA, 38 bp, Artificial Sequence
  Synthetic oligonucleotide
aacgacgcagcaaacggattgccagaccagtggagtga

SEQ ID NO: 9086 - DNA, 38 bp, Artificial Sequence
  Synthetic oligonucleotide
acacgcccgacaatgtagaggatgtcgccagattttga

SEQ ID NO: 9087 - DNA, 36 bp, Artificial Sequence
  Synthetic oligonucleotide
acatgctcagcccatttcgtcatcatacacgcacca

SEQ ID NO: 9088 - DNA, 35 bp, Artificial Sequence
  Synthetic oligonucleotide
acccgtgtaggggacgttaactggctgcctcaaca

SEQ ID NO: 9089 - DNA, 35 bp, Artificial Sequence
  Synthetic oligonucleotide
atgccccggcacacactgtcgtcgagacattaacg

SEQ ID NO: 9090 - DNA, 38 bp, Artificial Sequence
  Synthetic oligonucleotide
atgctgccggttaggtctgattgaggcttaggtggtga

SEQ ID NO: 9091 - DNA, 35 bp, Artificial Sequence
  Synthetic oligonucleotide
cgggccggctagggatcagtgcggattcaagtgcc

SEQ ID NO: 9092 - DNA, 35 bp, Artificial Sequence
  Synthetic oligonucleotide
gaacacgaccaccagcatgcacaagacctacacta

SEQ ID NO: 9093 - DNA, 37 bp, Artificial Sequence
  Synthetic oligonucleotide
gaccagcccaacagtgataacaactgtcacgctcgga

SEQ ID NO: 9094 - DNA, 35 bp, Artificial Sequence
  Synthetic oligonucleotide
gactcggggcgaaagcctacctgcaggattgttgc

SEQ ID NO: 9095 - DNA, 36 bp, Artificial Sequence
  Synthetic oligonucleotide
gagccccgcgcacgccccccatatcgaccctctcca

SEQ ID NO: 9096 - DNA, 36 bp, Artificial Sequence
  Synthetic oligonucleotide
gtggagtcgcacgcggcgtttctggacggaacttta

SEQ ID NO: 9097 - DNA, 35 bp, Artificial Sequence
  Synthetic oligonucleotide
tacgaccggaacacgcgtaccaagagacgagcggt

SEQ ID NO: 9098 - DNA, 35 bp, Artificial Sequence
  Synthetic oligonucleotide
tccatgcgcaggcagactgcttcacctacgccatc

SEQ ID NO: 9099 - DNA, 36 bp, Artificial Sequence
  Synthetic oligonucleotide
tgagcggaggcctggcaggtatagtcgccatggcaa

SEQ ID NO: 9100 - DNA, 35 bp, Artificial Sequence
  Synthetic oligonucleotide
aaccgacgcgcaagacgggcggagagggagtgggt

SEQ ID NO: 9101 - DNA, 38 bp, Artificial Sequence
  Synthetic oligonucleotide
acactagctgccagaatcataatgtagcctcgttgcga

SEQ ID NO: 9102 - DNA, 38 bp, Artificial Sequence
  Synthetic oligonucleotide
atccacacgtctcctaagcgtgagtcttgctcccctga

SEQ ID NO: 9103 - DNA, 36 bp, Artificial Sequence
  Synthetic oligonucleotide
gacaacgctcccatgcccacatgtcgtaggatacga

SEQ ID NO: 9104 - DNA, 35 bp, Artificial Sequence
  Synthetic oligonucleotide
gaccaactgctgcatgcaaatacaacgtacggtaa

SEQ ID NO: 9105 - DNA, 38 bp, Artificial Sequence
  Synthetic oligonucleotide
gaccacccgtcgattggcgtaggggcgagtaactctga

SEQ ID NO: 9106 - DNA, 35 bp, Artificial Sequence
  Synthetic oligonucleotide
gacgacgggagcctagctaaacattccgccttccg

SEQ ID NO: 9107 - DNA, 35 bp, Artificial Sequence
  Synthetic oligonucleotide
gacgacgtactgatgtacgagcctaccacgtgaac

SEQ ID NO: 9108 - DNA, 38 bp, Artificial Sequence
  Synthetic oligonucleotide
gatacgccgccccggactctttacctggatatgcttga

SEQ ID NO: 9109 - DNA, 37 bp, Artificial Sequence
  Synthetic oligonucleotide
gatgcgacggaacacaactcgcattctgcagacagga

SEQ ID NO: 9110 - DNA, 37 bp, Artificial Sequence
  Synthetic oligonucleotide
gatgtccgcatgtacatatgcaaccggacaaatccga

SEQ ID NO: 9111 - DNA, 36 bp, Artificial Sequence
  Synthetic oligonucleotide
gcaccaccgctcgcccattcgaaacgccacattggg

SEQ ID NO: 9112 - DNA, 37 bp, Artificial Sequence
  Synthetic oligonucleotide
gcacccggtcggtctcagttagatgcattgcacacga

SEQ ID NO: 9113 - DNA, 38 bp, Artificial Sequence
  Synthetic oligonucleotide
gcacgcatcggaggaaaattgtctttatggctgattga

SEQ ID NO: 9114 - DNA, 36 bp, Artificial Sequence
  Synthetic oligonucleotide
gcccagtcaataacgcgaattctgtgccgctagcca

SEQ ID NO: 9115 - DNA, 37 bp, Artificial Sequence
  Synthetic oligonucleotide
gcgtgaagcaggggggaggcgaaaaggtgctacgaga

SEQ ID NO: 9116 - DNA, 35 bp, Artificial Sequence
  Synthetic oligonucleotide
ggacacacgctaggaaccgttccgattgtcgacga

SEQ ID NO: 9117 - DNA, 36 bp, Artificial Sequence
  Synthetic oligonucleotide
gtccaccgacagagttctgacatgacgtatctgcca

SEQ ID NO: 9118 - DNA, 35 bp, Artificial Sequence
  Synthetic oligonucleotide
gtgacacggccaaactattgacacggcctgtagtc

SEQ ID NO: 9119 - DNA, 35 bp, Artificial Sequence
  Synthetic oligonucleotide
tacgactccgaccccgactcctatgcaccctgatc

SEQ ID NO: 9120 - DNA, 37 bp, Artificial Sequence
  Synthetic oligonucleotide
tccacacgtgccccgaaatggacgtaactgaagctga

SEQ ID NO: 9121 - DNA, 36 bp, Artificial Sequence
  Synthetic oligonucleotide
tcccacccgccgcctgcactagattatcgctcccga

SEQ ID NO: 9122 - DNA, 35 bp, Artificial Sequence
  Synthetic oligonucleotide
tgaaccgcaacaccagctgcctccttccgacacac

SEQ ID NO: 9123 - DNA, 35 bp, Artificial Sequence
  Synthetic oligonucleotide
tgacacccacaggcattcttgtttcgaaatcttac

SEQ ID NO: 9124 - DNA, 37 bp, Artificial Sequence
  Synthetic oligonucleotide
tgacacctcaacgatccggacggtcttatatgttgga

SEQ ID NO: 9125 - DNA, 37 bp, Artificial Sequence
  Synthetic oligonucleotide
ttcacaagcgcatgagtgatgattgtgttacaggtga

SEQ ID NO: 9126 - DNA, 35 bp, Artificial Sequence
  Synthetic oligonucleotide
aacgcaaccgcaagaccggtaatacgtgccaacga

SEQ ID NO: 9127 - DNA, 36 bp, Artificial Sequence
  Synthetic oligonucleotide
acactgaccccgtaccggctcatattgacttcccta

SEQ ID NO: 9128 - DNA, 35 bp, Artificial Sequence
  Synthetic oligonucleotide
accacggcgacgcagttgggtagactttttccgga

SEQ ID NO: 9129 - DNA, 36 bp, Artificial Sequence
  Synthetic oligonucleotide
accagacgcacaggctcaatcttgacactctccgta

SEQ ID NO: 9130 - DNA, 36 bp, Artificial Sequence
  Synthetic oligonucleotide
atgctggctgacggtacatgtcgatgcccaatttca

SEQ ID NO: 9131 - DNA, 37 bp, Artificial Sequence
  Synthetic oligonucleotide
gaaccgcggaatgctgccccaacagtccgtactacga

SEQ ID NO: 9132 - DNA, 36 bp, Artificial Sequence
  Synthetic oligonucleotide
gacaccacaacggcgtggaacgcgaaccttgcccca

SEQ ID NO: 9133 - DNA, 37 bp, Artificial Sequence
  Synthetic oligonucleotide
gaccacgaatcagaaacatgcggactcaacgaggaga

SEQ ID NO: 9134 - DNA, 35 bp, Artificial Sequence
  Synthetic oligonucleotide
gaccggaggagctggtagttggagtgaagtacatc

SEQ ID NO: 9135 - DNA, 35 bp, Artificial Sequence
  Synthetic oligonucleotide
gacgacgagcacatgattctctggaaaaggacctt

SEQ ID NO: 9136 - DNA, 37 bp, Artificial Sequence
  Synthetic oligonucleotide
gccaacacctccagcggtagacccaaatttgattaga

SEQ ID NO: 9137 - DNA, 35 bp, Artificial Sequence
  Synthetic oligonucleotide
gccgcaaaaccattccatcgagtgactccatttta

SEQ ID NO: 9138 - DNA, 37 bp, Artificial Sequence
  Synthetic oligonucleotide
gcctcgcaaaccacatgatgcgataacgagtgcagga

SEQ ID NO: 9139 - DNA, 38 bp, Artificial Sequence
  Synthetic oligonucleotide
gtgcccacaactgactgccgactagaaccttatgttga

SEQ ID NO: 9140 - DNA, 37 bp, Artificial Sequence
  Synthetic oligonucleotide
tagacacccaggaaggttcattcgccggagtggcgga

SEQ ID NO: 9141 - DNA, 35 bp, Artificial Sequence
  Synthetic oligonucleotide
tgacccgtggaggatacgtacggacacagcgcata

SEQ ID NO: 9142 - DNA, 37 bp, Artificial Sequence
  Synthetic oligonucleotide
tgtgccgaacactgccatcaatcccgcactctcccga

SEQ ID NO: 9143 - DNA, 36 bp, Artificial Sequence
  Synthetic oligonucleotide
ttgagcgaggcccggaactgtatcctaacgcgacga

SEQ ID NO: 9144 - DNA, 36 bp, Artificial Sequence
  Synthetic oligonucleotide
aacacacgccgcacatgtgaggttcgacgcctggca

SEQ ID NO: 9145 - DNA, 36 bp, Artificial Sequence
  Synthetic oligonucleotide
aacgacgcaacaagcagacgtatagagtcctagcaa

SEQ ID NO: 9146 - DNA, 38 bp, Artificial Sequence
  Synthetic oligonucleotide
aacgcaccagaagtctggggacttacgtctggttatga

SEQ ID NO: 9147 - DNA, 35 bp, Artificial Sequence
  Synthetic oligonucleotide
aagcaccaaccactacactgaccccgcacataact

SEQ ID NO: 9148 - DNA, 36 bp, Artificial Sequence
  Synthetic oligonucleotide
acacaccggaaggctgaggatcagatgagaccccta

SEQ ID NO: 9149 - DNA, 38 bp, Artificial Sequence
  Synthetic oligonucleotide
acacccgcggtcggagcgtacttgatagaggcgcatga

SEQ ID NO: 9150 - DNA, 35 bp, Artificial Sequence
  Synthetic oligonucleotide
acaccgcacggacaagattaggaggtcgatttggt

SEQ ID NO: 9151 - DNA, 38 bp, Artificial Sequence
  Synthetic oligonucleotide
acacgcacagcacccctggtttacgaacagcaagttga

SEQ ID NO: 9152 - DNA, 37 bp, Artificial Sequence
  Synthetic oligonucleotide
accaccgtaaggtcgatgagggcacactgatatagga

SEQ ID NO: 9153 - DNA, 38 bp, Artificial Sequence
  Synthetic oligonucleotide
accgaaggggggaaacgaagggtaggcgatccacctga

SEQ ID NO: 9154 - DNA, 38 bp, Artificial Sequence
  Synthetic oligonucleotide
cgggacacagcagtgtgccgtcgtatgtgggctcttga

SEQ ID NO: 9155 - DNA, 38 bp, Artificial Sequence
  Synthetic oligonucleotide
gacacggaggagggtctaacggagagaggcatacgtga

SEQ ID NO: 9156 - DNA, 35 bp, Artificial Sequence
  Synthetic oligonucleotide
gacccacaagccagacgtttaatcaggtatacgaa

SEQ ID NO: 9157 - DNA, 35 bp, Artificial Sequence
  Synthetic oligonucleotide
gacgacagaacgtccggcccaacgaagaacatctg

SEQ ID NO: 9158 - DNA, 37 bp, Artificial Sequence
  Synthetic oligonucleotide
gagccagaagcaaggaatgacgcccaggtccgtctga

SEQ ID NO: 9159 - DNA, 36 bp, Artificial Sequence
  Synthetic oligonucleotide
gagcccgaaacaggtgggtgaacattccggctctca

SEQ ID NO: 9160 - DNA, 37 bp, Artificial Sequence
  Synthetic oligonucleotide
gcacagccatgcgaaatgttaatgagtactgatccga

SEQ ID NO: 9161 - DNA, 35 bp, Artificial Sequence
  Synthetic oligonucleotide
gcacgtgccagtatatttcgcagaggtcacccata

SEQ ID NO: 9162 - DNA, 36 bp, Artificial Sequence
  Synthetic oligonucleotide
gccacaccagtcagctcaccagtattgcgaggtcca

SEQ ID NO: 9163 - DNA, 37 bp, Artificial Sequence
  Synthetic oligonucleotide
gccagcggtctaagggcatggtcaacatctttataga

SEQ ID NO: 9164 - DNA, 36 bp, Artificial Sequence
  Synthetic oligonucleotide
gcgaatgggaagcggtcctcgcaagatgagcacgta

SEQ ID NO: 9165 - DNA, 36 bp, Artificial Sequence
  Synthetic oligonucleotide
gctcacccgcggacatgcacctttgaccaccttcca

SEQ ID NO: 9166 - DNA, 36 bp, Artificial Sequence
  Synthetic oligonucleotide
gtccaccggaactccaaagggactagtactagcaga

SEQ ID NO: 9167 - DNA, 36 bp, Artificial Sequence
  Synthetic oligonucleotide
gtgaccccacccgatcgtgatcctgtgagcatcgta

SEQ ID NO: 9168 - DNA, 35 bp, Artificial Sequence
  Synthetic oligonucleotide
gtgcgacgcccgaatgaccgccggagaaccgacaa

SEQ ID NO: 9169 - DNA, 35 bp, Artificial Sequence
  Synthetic oligonucleotide
gtgcgtacgccaaatgacatccgttgaacccccac

SEQ ID NO: 9170 - DNA, 36 bp, Artificial Sequence
  Synthetic oligonucleotide
gtgggacctaacgtccaatgcatttcaccccatgta

SEQ ID NO: 9171 - DNA, 38 bp, Artificial Sequence
  Synthetic oligonucleotide
gttgcgggacagtactgtatgctaggaccgagacgtga

SEQ ID NO: 9172 - DNA, 37 bp, Artificial Sequence
  Synthetic oligonucleotide
tacatccgcaactcgctgctaagcccatccattccga

SEQ ID NO: 9173 - DNA, 36 bp, Artificial Sequence
  Synthetic oligonucleotide
tacgcacaaaccgagaaggtagacgtgctccgttca

SEQ ID NO: 9174 - DNA, 36 bp, Artificial Sequence
  Synthetic oligonucleotide
tcaaccccaaggaaaacgcttaactgtgtgcgggca

SEQ ID NO: 9175 - DNA, 37 bp, Artificial Sequence
  Synthetic oligonucleotide
tcagtccggaagggaaagcaaggaacgctatgaatga

SEQ ID NO: 9176 - DNA, 35 bp, Artificial Sequence
  Synthetic oligonucleotide
tcccaccctaactccatttcaaaagaccccgtgcc

SEQ ID NO: 9177 - DNA, 38 bp, Artificial Sequence
  Synthetic oligonucleotide
tgacgacgcaaccatttattcgagacgtcttcggttga

SEQ ID NO: 9178 - DNA, 37 bp, Artificial Sequence
  Synthetic oligonucleotide
ttagcccatcctgtcggtcacacaggcgtcccaacga

SEQ ID NO: 9179 - DNA, 35 bp, Artificial Sequence
  Synthetic oligonucleotide
aacaacggcataatagggcgacgagaatatagttt

SEQ ID NO: 9180 - DNA, 35 bp, Artificial Sequence
  Synthetic oligonucleotide
aacgccaacctcctcgcgagtcaaggcaaggtgcg

SEQ ID NO: 9181 - DNA, 35 bp, Artificial Sequence
  Synthetic oligonucleotide
acagacgtaagccagatatcacaggtagagttttc

SEQ ID NO: 9182 - DNA, 37 bp, Artificial Sequence
  Synthetic oligonucleotide
acagtgcgggtgctcaccgttccggtctctcgtgcga

SEQ ID NO: 9183 - DNA, 37 bp, Artificial Sequence
  Synthetic oligonucleotide
acgatccgttacctcggtcgcttccgaaagggcttga

SEQ ID NO: 9184 - DNA, 38 bp, Artificial Sequence
  Synthetic oligonucleotide
gaacagagcggtagtgaagtgaacgtctgactgtatga

SEQ ID NO: 9185 - DNA, 38 bp, Artificial Sequence
  Synthetic oligonucleotide
gacacagactgccggatgtgagtgctgagcgagcatga

SEQ ID NO: 9186 - DNA, 38 bp, Artificial Sequence
  Synthetic oligonucleotide
gacacgaagcagtaaagtgaagcagtgagagtgaatga

SEQ ID NO: 9187 - DNA, 36 bp, Artificial Sequence
  Synthetic oligonucleotide
gacatgttcagcaggagcgtatagaggatgccgata

SEQ ID NO: 9188 - DNA, 36 bp, Artificial Sequence
  Synthetic oligonucleotide
gacggtcccaagtgcactcgtgctgtattgcttcta

SEQ ID NO: 9189 - DNA, 37 bp, Artificial Sequence
  Synthetic oligonucleotide
gactacgccggataactggttaagtacactcaattga

SEQ ID NO: 9190 - DNA, 36 bp, Artificial Sequence
  Synthetic oligonucleotide
gactcgacatcatatggtcaacagtcagtgcgatta

SEQ ID NO: 9191 - DNA, 36 bp, Artificial Sequence
  Synthetic oligonucleotide
gagacgcgaacagtgtaccgctcataaacgtagtca

SEQ ID NO: 9192 - DNA, 35 bp, Artificial Sequence
  Synthetic oligonucleotide
gatgtccagagcgaagtcacaccatttaatttagt

SEQ ID NO: 9193 - DNA, 35 bp, Artificial Sequence
  Synthetic oligonucleotide
gcaaacgccacctccaataacgacccgattccgtg

SEQ ID NO: 9194 - DNA, 38 bp, Artificial Sequence
  Synthetic oligonucleotide
gcaaccccagctctcaatgaacggtaaatcattcctga

SEQ ID NO: 9195 - DNA, 36 bp, Artificial Sequence
  Synthetic oligonucleotide
gccggaacagttaagatactaagggactgagcgtta

SEQ ID NO: 9196 - DNA, 36 bp, Artificial Sequence
  Synthetic oligonucleotide
gccgtcgtacaaggtggcaagagccatcgattacca

SEQ ID NO: 9197 - DNA, 36 bp, Artificial Sequence
  Synthetic oligonucleotide
gcgaacgtactaatctcgtgaactccacatgttaaa

SEQ ID NO: 9198 - DNA, 35 bp, Artificial Sequence
  Synthetic oligonucleotide
gcgaagcgcgttccagcacgtgctacataaccgtt

SEQ ID NO: 9199 - DNA, 36 bp, Artificial Sequence
  Synthetic oligonucleotide
gctgtgcaacgtgaaaatagtagcctagatcgctaa

SEQ ID NO: 9200 - DNA, 36 bp, Artificial Sequence
  Synthetic oligonucleotide
ggtccctctgcatgaactgaccccgcttacacatca

SEQ ID NO: 9201 - DNA, 38 bp, Artificial Sequence
  Synthetic oligonucleotide
tacgcgtgcaccgtttctgcggtacattgctgatttga

SEQ ID NO: 9202 - DNA, 38 bp, Artificial Sequence
  Synthetic oligonucleotide
tatgcaccgacattacattctgtccggtaattcgctga

SEQ ID NO: 9203 - DNA, 36 bp, Artificial Sequence
  Synthetic oligonucleotide
tcaccaccggagcggggtgcactgaggcgtgaggca

SEQ ID NO: 9204 - DNA, 35 bp, Artificial Sequence
  Synthetic oligonucleotide
tcagccggaagtagtcgcaatgagagtgcatgggc

SEQ ID NO: 9205 - DNA, 35 bp, Artificial Sequence
  Synthetic oligonucleotide
tcgaggacgccccacatctgaacgacaagcttgcc

SEQ ID NO: 9206 - DNA, 36 bp, Artificial Sequence
  Synthetic oligonucleotide
tgcacatcagagtgtcgacacggtgaggtacgacaa

SEQ ID NO: 9207 - DNA, 35 bp, Artificial Sequence
  Synthetic oligonucleotide
ttagggccggaacacacgtgtaatgactgtgattg

SEQ ID NO: 9208 - DNA, 35 bp, Artificial Sequence
  Synthetic oligonucleotide
ttgcccaaccccgtaaggaggcccgcaccttgacc

SEQ ID NO: 9209 - DNA, 35 bp, Artificial Sequence
  Synthetic oligonucleotide
ttggcccgaacctgccgaaaccctcagctgtactg

SEQ ID NO: 9210 - DNA, 37 bp, Artificial Sequence
  Synthetic oligonucleotide
aacaccagagggtagtcacggtagccttttgatgtga

SEQ ID NO: 9211 - DNA, 37 bp, Artificial Sequence
  Synthetic oligonucleotide
aacacgcgaagtttgaccctcaagttcagttaagtga

SEQ ID NO: 9212 - DNA, 35 bp, Artificial Sequence
  Synthetic oligonucleotide
aatgcaccgcagggttataggcgagaatcgttacg

SEQ ID NO: 9213 - DNA, 38 bp, Artificial Sequence
  Synthetic oligonucleotide
acaacgaccgaaaagacaatggtataaatgaagcttga

SEQ ID NO: 9214 - DNA, 38 bp, Artificial Sequence
  Synthetic oligonucleotide
acacgacactgttcaatgcaccaccacatagcttgtga

SEQ ID NO: 9215 - DNA, 35 bp, Artificial Sequence
  Synthetic oligonucleotide
acacgcacctaccactatatgtaccatctgcatcc

SEQ ID NO: 9216 - DNA, 35 bp, Artificial Sequence
  Synthetic oligonucleotide
acatgccgaccccggtttagcatatagaaccaacc

SEQ ID NO: 9217 - DNA, 36 bp, Artificial Sequence
  Synthetic oligonucleotide
acgcccaaccctgattcgactgtgttatctcgccca

SEQ ID NO: 9218 - DNA, 36 bp, Artificial Sequence
  Synthetic oligonucleotide
acgtacccgacactgaccccgaatcttgacgcgcta

SEQ ID NO: 9219 - DNA, 37 bp, Artificial Sequence
  Synthetic oligonucleotide
atgaccccggtcagcaacgcagacgcctcctagtgga

SEQ ID NO: 9220 - DNA, 38 bp, Artificial Sequence
  Synthetic oligonucleotide
gaagccagtgtacgtaaagttgttgacaaacacaatga

SEQ ID NO: 9221 - DNA, 35 bp, Artificial Sequence
  Synthetic oligonucleotide
gacaaccgacaacagcgcaaggatcttcaaccgcc

SEQ ID NO: 9222 - DNA, 35 bp, Artificial Sequence
  Synthetic oligonucleotide
gacacccgacgcaagcacaaaagagaggaccatcg

SEQ ID NO: 9223 - DNA, 37 bp, Artificial Sequence
  Synthetic oligonucleotide
gacgagagcgctcgttttgaccgaacagttctctgga

SEQ ID NO: 9224 - DNA, 35 bp, Artificial Sequence
  Synthetic oligonucleotide
gatgcaacgccaacatatgttacttacagtgtacg

SEQ ID NO: 9225 - DNA, 36 bp, Artificial Sequence
  Synthetic oligonucleotide
gatgtcgcagaccacgtaatccgtttatgcaggaaa

SEQ ID NO: 9226 - DNA, 38 bp, Artificial Sequence
  Synthetic oligonucleotide
gcaacaacaaggtaaggcatttttcgtcattttcatga

SEQ ID NO: 9227 - DNA, 36 bp, Artificial Sequence
  Synthetic oligonucleotide
gcaacgcccagctgcatttagcacgtccgtgagtaa

SEQ ID NO: 9228 - DNA, 35 bp, Artificial Sequence
  Synthetic oligonucleotide
gcacaacgtgcacgacgacatctacatggctcacc

SEQ ID NO: 9229 - DNA, 35 bp, Artificial Sequence
  Synthetic oligonucleotide
gcaggctgacccgttagttcgcttcctcgtgggct

SEQ ID NO: 9230 - DNA, 35 bp, Artificial Sequence
  Synthetic oligonucleotide
gcagtgctgccggcgatcaggctcactggagctct

SEQ ID NO: 9231 - DNA, 35 bp, Artificial Sequence
  Synthetic oligonucleotide
gccaatgccgccatgtggtgaacgcgaaagggagt

SEQ ID NO: 9232 - DNA, 35 bp, Artificial Sequence
  Synthetic oligonucleotide
gcccacgccacatttacattacgcttactccggcg

SEQ ID NO: 9233 - DNA, 36 bp, Artificial Sequence
  Synthetic oligonucleotide
ggggccggagggtataacggccgcacgttggaagca

SEQ ID NO: 9234 - DNA, 37 bp, Artificial Sequence
  Synthetic oligonucleotide
gtcaaggccgccaagacaatccgatcagcgatgagga

SEQ ID NO: 9235 - DNA, 36 bp, Artificial Sequence
  Synthetic oligonucleotide
gtctgaaccgtccaacagagaacacgtacatgtaaa

SEQ ID NO: 9236 - DNA, 37 bp, Artificial Sequence
  Synthetic oligonucleotide
gtgacacacttcaatcaacagtacagagttcgtggga

SEQ ID NO: 9237 - DNA, 37 bp, Artificial Sequence
  Synthetic oligonucleotide
tacaccgcaaaggggaaggtgtgatgatgggagtcga

SEQ ID NO: 9238 - DNA, 35 bp, Artificial Sequence
  Synthetic oligonucleotide
tgacggaccggaacttccactgtgggtatgcggta

SEQ ID NO: 9239 - DNA, 36 bp, Artificial Sequence
  Synthetic oligonucleotide
tgccctcccaagggcaaggtccaacatcgaaataga

SEQ ID NO: 9240 - DNA, 35 bp, Artificial Sequence
  Synthetic oligonucleotide
aacacagcagtgacataagtattatcgtgctttgg

SEQ ID NO: 9241 - DNA, 36 bp, Artificial Sequence
  Synthetic oligonucleotide
atgacgcgcacgcacccacacacacctccctagtaa

SEQ ID NO: 9242 - DNA, 36 bp, Artificial Sequence
  Synthetic oligonucleotide
gaaaccgcggaggctgcctaattacgtatacatcta

SEQ ID NO: 9243 - DNA, 36 bp, Artificial Sequence
  Synthetic oligonucleotide
gaacaacgaactctgtgcatgagtaggtggaacaca

SEQ ID NO: 9244 - DNA, 37 bp, Artificial Sequence
  Synthetic oligonucleotide
gacactggggtgcacgtacgtagtttgctggtaagga

SEQ ID NO: 9245 - DNA, 35 bp, Artificial Sequence
  Synthetic oligonucleotide
gacatacgcacgagcagttgagttgcaaggcgttc

SEQ ID NO: 9246 - DNA, 37 bp, Artificial Sequence
  Synthetic oligonucleotide
gacgacgatcaggcggaaggaggggttggagggagga

SEQ ID NO: 9247 - DNA, 37 bp, Artificial Sequence
  Synthetic oligonucleotide
gacgcaacgagtcacgatgccttacccaacagccgga

SEQ ID NO: 9248 - DNA, 35 bp, Artificial Sequence
  Synthetic oligonucleotide
gagccacatgggcgaacgtatccctttacccggtt

SEQ ID NO: 9249 - DNA, 38 bp, Artificial Sequence
  Synthetic oligonucleotide
gatggcccgtgcatcgtattgggcccgcttaaatttga

SEQ ID NO: 9250 - DNA, 36 bp, Artificial Sequence
  Synthetic oligonucleotide
gcacaacgacgattggtgcgtactaggatcccaata

SEQ ID NO: 9251 - DNA, 35 bp, Artificial Sequence
  Synthetic oligonucleotide
gcacaactcctgtccatcccaatggaaaggaacca

SEQ ID NO: 9252 - DNA, 35 bp, Artificial Sequence
  Synthetic oligonucleotide
gcacatggtccactcctccaattcgtactctggac

SEQ ID NO: 9253 - DNA, 35 bp, Artificial Sequence
  Synthetic oligonucleotide
gcacccaccgacaacacctaaccataccgcatttg

SEQ ID NO: 9254 - DNA, 37 bp, Artificial Sequence
  Synthetic oligonucleotide
gcaccgaacgcagagaacgaattcgacaagtggccga

SEQ ID NO: 9255 - DNA, 36 bp, Artificial Sequence
  Synthetic oligonucleotide
gcacgcgcaaatggtcgggggaaccattagaaggca

SEQ ID NO: 9256 - DNA, 37 bp, Artificial Sequence
  Synthetic oligonucleotide
gcatgtcacgccgcgattaagctcggccataatcgga

SEQ ID NO: 9257 - DNA, 35 bp, Artificial Sequence
  Synthetic oligonucleotide
gcgatgatccggtagttgtcgttagactcactcgt

SEQ ID NO: 9258 - DNA, 35 bp, Artificial Sequence
  Synthetic oligonucleotide
gctgaccgaggatgttcatgccactcgcgaaagtc

SEQ ID NO: 9259 - DNA, 38 bp, Artificial Sequence
  Synthetic oligonucleotide
gctgagagcgaagaagggtcctgagactcgcagaatga

SEQ ID NO: 9260 - DNA, 35 bp, Artificial Sequence
  Synthetic oligonucleotide
gtgacgaccgtaatcttggcgccttatacacgacg

SEQ ID NO: 9261 - DNA, 36 bp, Artificial Sequence
  Synthetic oligonucleotide
gtgacgaggtgttcaaatgatggtgggccatcggta

SEQ ID NO: 9262 - DNA, 36 bp, Artificial Sequence
  Synthetic oligonucleotide
gtgagcccccgacaagagagacgtggcgtacctaca

SEQ ID NO: 9263 - DNA, 35 bp, Artificial Sequence
  Synthetic oligonucleotide
gtgagcggaacgatcgatcacacgtcttgaccagc

SEQ ID NO: 9264 - DNA, 36 bp, Artificial Sequence
  Synthetic oligonucleotide
taaccacccccagacgtctcgcaccagtccccccga

SEQ ID NO: 9265 - DNA, 37 bp, Artificial Sequence
  Synthetic oligonucleotide
tacagaacggccatacgcgtgtagatagtagcccaga

SEQ ID NO: 9266 - DNA, 35 bp, Artificial Sequence
  Synthetic oligonucleotide
tcaccacaacagctgtagcaacggacaagggggcc

SEQ ID NO: 9267 - DNA, 38 bp, Artificial Sequence
  Synthetic oligonucleotide
tcacgttccgacctctgcagttacgtttagacacttga

SEQ ID NO: 9268 - DNA, 35 bp, Artificial Sequence
  Synthetic oligonucleotide
tccaaccgcgtgaacactgtttttgcataagatcc

SEQ ID NO: 9269 - DNA, 36 bp, Artificial Sequence
  Synthetic oligonucleotide
tcccacgcacagtgaacggccaggcaaatctcatca

SEQ ID NO: 9270 - DNA, 38 bp, Artificial Sequence
  Synthetic oligonucleotide
tccgacacgccaaagggacaattggtaagactccatga

SEQ ID NO: 9271 - DNA, 37 bp, Artificial Sequence
  Synthetic oligonucleotide
aaccagccagtagtgtggataacggtgctgaccatga

SEQ ID NO: 9272 - DNA, 38 bp, Artificial Sequence
  Synthetic oligonucleotide
aactgaggctcgcaaaccgtagtgcagtctgtacttga

SEQ ID NO: 9273 - DNA, 35 bp, Artificial Sequence
  Synthetic oligonucleotide
acacacggaacggatcagtcagcacctaatgtgcg

SEQ ID NO: 9274 - DNA, 35 bp, Artificial Sequence
  Synthetic oligonucleotide
acacgtaggcgaacagtcgctgctcgatgacatcg

SEQ ID NO: 9275 - DNA, 38 bp, Artificial Sequence
  Synthetic oligonucleotide
acatgcgccccgccaccatccagaccagtccatagtga

SEQ ID NO: 9276 - DNA, 35 bp, Artificial Sequence
  Synthetic oligonucleotide
accgaccgcaacacacaagttacccgatccgacaa

SEQ ID NO: 9277 - DNA, 38 bp, Artificial Sequence
  Synthetic oligonucleotide
acgtacggcgcacgtgtggattggatcctgccacctga

SEQ ID NO: 9278 - DNA, 35 bp, Artificial Sequence
  Synthetic oligonucleotide
actcaccgaaagcacatatacacccacagttggct

SEQ ID NO: 9279 - DNA, 36 bp, Artificial Sequence
  Synthetic oligonucleotide
agacacgcaactgcagagctgtcccacctagataaa

SEQ ID NO: 9280 - DNA, 37 bp, Artificial Sequence
  Synthetic oligonucleotide
ataccgcaacagccatgtatagagccgagcgcttcga

SEQ ID NO: 9281 - DNA, 37 bp, Artificial Sequence
  Synthetic oligonucleotide
atgaacacgcacaggaaggtcgtcaccacgcggatga

SEQ ID NO: 9282 - DNA, 38 bp, Artificial Sequence
  Synthetic oligonucleotide
gaacgagtcgctggcatacaagacgaaactggtactga

SEQ ID NO: 9283 - DNA, 38 bp, Artificial Sequence
  Synthetic oligonucleotide
gacacaacgaacagggggcatgagagcggtcgtaatga

SEQ ID NO: 9284 - DNA, 38 bp, Artificial Sequence
  Synthetic oligonucleotide
gacacgcggtcgcacctctgttttttatgcacacgtga

SEQ ID NO: 9285 - DNA, 35 bp, Artificial Sequence
  Synthetic oligonucleotide
gaccatcacagggagtgccatggaagtctgtagtc

SEQ ID NO: 9286 - DNA, 35 bp, Artificial Sequence
  Synthetic oligonucleotide
gacgctcactgaccccgcttttcagtatatttctt

SEQ ID NO: 9287 - DNA, 38 bp, Artificial Sequence
  Synthetic oligonucleotide
gactgccacagagctccaagtgccggtacatcgaatga

SEQ ID NO: 9288 - DNA, 37 bp, Artificial Sequence
  Synthetic oligonucleotide
gatgagtcgcagtcgggacaaagagcggtgacggaaa

SEQ ID NO: 9289 - DNA, 38 bp, Artificial Sequence
  Synthetic oligonucleotide
gcatgcccatgtggtcatccaaggaaccatccttctga

SEQ ID NO: 9290 - DNA, 35 bp, Artificial Sequence
  Synthetic oligonucleotide
gccaacagcgcgacgatcggggtcaaggcgtgacg

SEQ ID NO: 9291 - DNA, 36 bp, Artificial Sequence
  Synthetic oligonucleotide
gcccacccatcggtttatgtatacaggttgaaagca

SEQ ID NO: 9292 - DNA, 37 bp, Artificial Sequence
  Synthetic oligonucleotide
gcccccagtccgcgacagctcacaaccaccactttga

SEQ ID NO: 9293 - DNA, 38 bp, Artificial Sequence
  Synthetic oligonucleotide
gtgacgcacaggcctgcttgcactcagagatggggtga

SEQ ID NO: 9294 - DNA, 37 bp, Artificial Sequence
  Synthetic oligonucleotide
tacacgcactcggatagagacgttgcccgttcatgga

SEQ ID NO: 9295 - DNA, 35 bp, Artificial Sequence
  Synthetic oligonucleotide
tacgccgggctgaacgcttccttggtgtcccaaca

SEQ ID NO: 9296 - DNA, 37 bp, Artificial Sequence
  Synthetic oligonucleotide
tcacgccaagcaacaggagcgcaacgacaaggctgga

SEQ ID NO: 9297 - DNA, 35 bp, Artificial Sequence
  Synthetic oligonucleotide
tccaacccaccctcctaatgtgacgaacattcgac

SEQ ID NO: 9298 - DNA, 38 bp, Artificial Sequence
  Synthetic oligonucleotide
tgtgcgcccaaccgactcagtcgtctcagcaaggatga

SEQ ID NO: 9299 - DNA, 37 bp, Artificial Sequence
  Synthetic oligonucleotide
aacatgcgccgtaatagcgtcgtcagaaccacaagga

SEQ ID NO: 9300 - DNA, 35 bp, Artificial Sequence
  Synthetic oligonucleotide
gaacgcagacgatgcattagactagtgtttcaacg

SEQ ID NO: 9301 - DNA, 37 bp, Artificial Sequence
  Synthetic oligonucleotide
gacactacgccgaacaataagccatgcctgacaggga

SEQ ID NO: 9302 - DNA, 37 bp, Artificial Sequence
  Synthetic oligonucleotide
gacgaagcaggtataagcacgtcacctcatacgccga

SEQ ID NO: 9303 - DNA, 38 bp, Artificial Sequence
  Synthetic oligonucleotide
gagaccgctgggaaagacaaaagtaccgattttgctga

SEQ ID NO: 9304 - DNA, 35 bp, Artificial Sequence
  Synthetic oligonucleotide
gcacgggtaacatcccgcattaagagcaggtaatg

SEQ ID NO: 9305 - DNA, 37 bp, Artificial Sequence
  Synthetic oligonucleotide
gccgatccaggcacgttttacctcagtaagattacga

SEQ ID NO: 9306 - DNA, 37 bp, Artificial Sequence
  Synthetic oligonucleotide
gctgaccacactcgatgctttctcacttccctataga

SEQ ID NO: 9307 - DNA, 38 bp, Artificial Sequence
  Synthetic oligonucleotide
gtgtacgcaggcacacattattacgtcataccagctga

SEQ ID NO: 9308 - DNA, 38 bp, Artificial Sequence
  Synthetic oligonucleotide
taccaagccgtatggagcactagagatgttcattgtga

SEQ ID NO: 9309 - DNA, 35 bp, Artificial Sequence
  Synthetic oligonucleotide
tagcgaagtcatccccatagtctcaatcccccgat

SEQ ID NO: 9310 - DNA, 35 bp, Artificial Sequence
  Synthetic oligonucleotide
tcaaaggcctagtcacgttcctctaatcttcttgt

SEQ ID NO: 9311 - DNA, 35 bp, Artificial Sequence
  Synthetic oligonucleotide
tccacacaggggcaatgagccggagcactgatagt

SEQ ID NO: 9312 - DNA, 35 bp, Artificial Sequence
  Synthetic oligonucleotide
tcgccgaagattagtccccagactgaagacgccca

SEQ ID NO: 9313 - DNA, 34 bp, Artificial Sequence
  Synthetic oligonucleotide
tgacgccacgctctaaatccctactaacctgaca

SEQ ID NO: 9314 - DNA, 36 bp, Artificial Sequence
  Synthetic oligonucleotide
tgcccgttaggttcccggcgattttggaatgaggga

SEQ ID NO: 9315 - DNA, 35 bp, Artificial Sequence
  Synthetic oligonucleotide
tgcgaccggtagggagacccctgtgtcctatgagt

SEQ ID NO: 9316 - DNA, 35 bp, Artificial Sequence
  Synthetic oligonucleotide
tgcgaggtggacgtatcagcgtgtccccgataaca

SEQ ID NO: 9317 - DNA, 37 bp, Artificial Sequence
  Synthetic oligonucleotide
acaccccggcacgaggtacatatacgccgaatgcaga

SEQ ID NO: 9318 - DNA, 38 bp, Artificial Sequence
  Synthetic oligonucleotide
acaccgccggcattaggtggagcaggcctaccgaatga

SEQ ID NO: 9319 - DNA, 37 bp, Artificial Sequence
  Synthetic oligonucleotide
acatcaccacgagattcagcgagagtattgataacga

SEQ ID NO: 9320 - DNA, 37 bp, Artificial Sequence
  Synthetic oligonucleotide
accgaacgcggctaagtgtgcttcactgcttaattga

SEQ ID NO: 9321 - DNA, 36 bp, Artificial Sequence
  Synthetic oligonucleotide
gacacaccacgcgcattcaacgtggcaaagtttcca

SEQ ID NO: 9322 - DNA, 38 bp, Artificial Sequence
  Synthetic oligonucleotide
gacatcagagcaacctgtcgagagaggagtggacctga

SEQ ID NO: 9323 - DNA, 37 bp, Artificial Sequence
  Synthetic oligonucleotide
gaccacagtctacgaaacaagccgactcggccaccga

SEQ ID NO: 9324 - DNA, 36 bp, Artificial Sequence
  Synthetic oligonucleotide
gaccacgacgtatagggcggacgacgggattgggta

SEQ ID NO: 9325 - DNA, 38 bp, Artificial Sequence
  Synthetic oligonucleotide
gacccgcaaaaggccgagtgatgtcatcttggacatga

SEQ ID NO: 9326 - DNA, 35 bp, Artificial Sequence
  Synthetic oligonucleotide
gacgatcgcgcgctgtggaatggtctttctgcgac

SEQ ID NO: 9327 - DNA, 38 bp, Artificial Sequence
  Synthetic oligonucleotide
gacgcgagtccctgcggcacgaacgttctagaacatga

SEQ ID NO: 9328 - DNA, 37 bp, Artificial Sequence
  Synthetic oligonucleotide
gacggtgcaactagacatctgtcaagatagccgagga

SEQ ID NO: 9329 - DNA, 35 bp, Artificial Sequence
  Synthetic oligonucleotide
gactcgccaatcagccgccataactcgtcacctcg

SEQ ID NO: 9330 - DNA, 38 bp, Artificial Sequence
  Synthetic oligonucleotide
gagcggatagtgtcgagcggtggtggagacgttagtga

SEQ ID NO: 9331 - DNA, 38 bp, Artificial Sequence
  Synthetic oligonucleotide
gatgcacaaccgattgacaggggacagtctcaaactga

SEQ ID NO: 9332 - DNA, 38 bp, Artificial Sequence
  Synthetic oligonucleotide
gatgcacctcgtgtatcgtgcactcccccgctctatga

SEQ ID NO: 9333 - DNA, 35 bp, Artificial Sequence
  Synthetic oligonucleotide
gcaagcaagcccagtcagaagtttcaccattgttt

SEQ ID NO: 9334 - DNA, 35 bp, Artificial Sequence
  Synthetic oligonucleotide
gcatcacctacagggactgacatagtgacttaact

SEQ ID NO: 9335 - DNA, 38 bp, Artificial Sequence
  Synthetic oligonucleotide
gcatgcacaagttttggcggttagtctacggtcgttga

SEQ ID NO: 9336 - DNA, 38 bp, Artificial Sequence
  Synthetic oligonucleotide
gctgacgtaggagtcttaccatgctatgaccacactga

SEQ ID NO: 9337 - DNA, 35 bp, Artificial Sequence
  Synthetic oligonucleotide
ggagtgccaacgggaatcgtacttggtcagctggc

SEQ ID NO: 9338 - DNA, 37 bp, Artificial Sequence
  Synthetic oligonucleotide
gtcgaaccatcaggcatcaacctcattcttcaaccga

SEQ ID NO: 9339 - DNA, 36 bp, Artificial Sequence
  Synthetic oligonucleotide
gtgacacgccattccgatatagtcgagcatcgaaga

SEQ ID NO: 9340 - DNA, 35 bp, Artificial Sequence
  Synthetic oligonucleotide
tacgcaacaatcatgtgagcggcatggctctggcg

SEQ ID NO: 9341 - DNA, 38 bp, Artificial Sequence
  Synthetic oligonucleotide
tagtgcctgggtgtagaagtagagtaagacaaggttga

SEQ ID NO: 9342 - DNA, 37 bp, Artificial Sequence
  Synthetic oligonucleotide
tgagcacggtctcagcgctaaatatcgttcttcccga

SEQ ID NO: 9343 - DNA, 35 bp, Artificial Sequence
  Synthetic oligonucleotide
tgcctggctcagtcgtcaccaaccggcatgttgtg

SEQ ID NO: 9344 - DNA, 37 bp, Artificial Sequence
  Synthetic oligonucleotide
tggaccccccaaggaccatctgctcagcctccatcga

SEQ ID NO: 9345 - DNA, 35 bp, Artificial Sequence
  Synthetic oligonucleotide
ttgcgcgggctaacgtgtatctcggagaagcgatg

SEQ ID NO: 9346 - DNA, 35 bp, Artificial Sequence
  Synthetic oligonucleotide
aacgccacagtgcgacgaccttgccactatatagg

SEQ ID NO: 9347 - DNA, 38 bp, Artificial Sequence
  Synthetic oligonucleotide
aacgccgccgggtatacaatcttgggtctcgctactga

SEQ ID NO: 9348 - DNA, 36 bp, Artificial Sequence
  Synthetic oligonucleotide
aacgtgtggcgcagtgggtgtcgggcaagattgaaa

SEQ ID NO: 9349 - DNA, 35 bp, Artificial Sequence
  Synthetic oligonucleotide
accatcccaccgcccgattacgtatgttgcctgac

SEQ ID NO: 9350 - DNA, 37 bp, Artificial Sequence
  Synthetic oligonucleotide
agccacgcacgagcacttccgtagcaatcgtcggtga

SEQ ID NO: 9351 - DNA, 38 bp, Artificial Sequence
  Synthetic oligonucleotide
gacatgctgggactcggtttacagttcacgtacgttga

SEQ ID NO: 9352 - DNA, 38 bp, Artificial Sequence
  Synthetic oligonucleotide
gagcacaccctcggacgaatacagaaagtgaatgttga

SEQ ID NO: 9353 - DNA, 35 bp, Artificial Sequence
  Synthetic oligonucleotide
gagtacgcgccggggtgagtacaatgcgatctcct

SEQ ID NO: 9354 - DNA, 35 bp, Artificial Sequence
  Synthetic oligonucleotide
gatgcgctcccactgactatcaaggagtgcgtcga

SEQ ID NO: 9355 - DNA, 35 bp, Artificial Sequence
  Synthetic oligonucleotide
gcaccccagtgccttccagccttaaactagtacgt

SEQ ID NO: 9356 - DNA, 38 bp, Artificial Sequence
  Synthetic oligonucleotide
gcccacgaggagtgtggcaagtcgttcccaaacgctga

SEQ ID NO: 9357 - DNA, 38 bp, Artificial Sequence
  Synthetic oligonucleotide
gtgcgaccgtgcgcgaaaacaagtcgaccgtactttga

SEQ ID NO: 9358 - DNA, 37 bp, Artificial Sequence
  Synthetic oligonucleotide
taacaccaacatgccatgctcgaacaggtcggccaga

SEQ ID NO: 9359 - DNA, 35 bp, Artificial Sequence
  Synthetic oligonucleotide
tacaaagccgacgtacacatggtaatcagtcatct

SEQ ID NO: 9360 - DNA, 35 bp, Artificial Sequence
  Synthetic oligonucleotide
tacacaaccacatactgtcagcgagaaggccccag

SEQ ID NO: 9361 - DNA, 38 bp, Artificial Sequence
  Synthetic oligonucleotide
taccctgcgcaagtcgagctaactactcatacttatga

SEQ ID NO: 9362 - DNA, 35 bp, Artificial Sequence
  Synthetic oligonucleotide
taccgtcacccgccactcatcacagctacccattg

SEQ ID NO: 9363 - DNA, 38 bp, Artificial Sequence
  Synthetic oligonucleotide
tacgcgacgaatgcaatagtggtaccagcaattgttga

SEQ ID NO: 9364 - DNA, 38 bp, Artificial Sequence
  Synthetic oligonucleotide
tatgccaaaccgtgcgatgtgcctcaagcctggactga

SEQ ID NO: 9365 - DNA, 35 bp, Artificial Sequence
  Synthetic oligonucleotide
tcaccgcaggggaacgaactcgtgtgacgggatgt

SEQ ID NO: 9366 - DNA, 34 bp, Artificial Sequence
  Synthetic oligonucleotide
tcagacacgcgcagtgacatccggcgacatgcca

SEQ ID NO: 9367 - DNA, 35 bp, Artificial Sequence
  Synthetic oligonucleotide
tgacgaccccaagggtgcgtactagccagtcactg

SEQ ID NO: 9368 - DNA, 37 bp, Artificial Sequence
  Synthetic oligonucleotide
tgacgcagggtggtaaggaacttctcaattcatacga

SEQ ID NO: 9369 - DNA, 36 bp, Artificial Sequence
  Synthetic oligonucleotide
tgacggtgcatctaatgtagtgagggttttgccaaa

SEQ ID NO: 9370 - DNA, 38 bp, Artificial Sequence
  Synthetic oligonucleotide
tgatgtgcgccctggattgttaaggacgtcagttatga

SEQ ID NO: 9371 - DNA, 38 bp, Artificial Sequence
  Synthetic oligonucleotide
tgccaccagagcagtgcgaaacaatacgaagctgatga

SEQ ID NO: 9372 - DNA, 36 bp, Artificial Sequence
  Synthetic oligonucleotide
aacaccgcaggaagccctctagtcagtgggccacca

SEQ ID NO: 9373 - DNA, 35 bp, Artificial Sequence
  Synthetic oligonucleotide
acaccaccaatcgcattacgccgaaaggaacctta

SEQ ID NO: 9374 - DNA, 35 bp, Artificial Sequence
  Synthetic oligonucleotide
acatgccgccggacgcgaatacacgccaagatgca

SEQ ID NO: 9375 - DNA, 36 bp, Artificial Sequence
  Synthetic oligonucleotide
atcaacaggcggtcaactaatcggagcggggctgga

SEQ ID NO: 9376 - DNA, 35 bp, Artificial Sequence
  Synthetic oligonucleotide
caccggccgacggaatgcgcatacttaacgagtta

SEQ ID NO: 9377 - DNA, 38 bp, Artificial Sequence
  Synthetic oligonucleotide
cgcaccaacggacagttccgggcattcatgatacatga

SEQ ID NO: 9378 - DNA, 36 bp, Artificial Sequence
  Synthetic oligonucleotide
gaacacgcaggtgcaacgacaattgccttcgacgga

SEQ ID NO: 9379 - DNA, 38 bp, Artificial Sequence
  Synthetic oligonucleotide
gacacagctcgaatgcgggttcaagtcgaggtatgtga

SEQ ID NO: 9380 - DNA, 36 bp, Artificial Sequence
  Synthetic oligonucleotide
gacacatggtgcaaggacgaggatcattaacggcga

SEQ ID NO: 9381 - DNA, 37 bp, Artificial Sequence
  Synthetic oligonucleotide
gacacgcatggtcaccggtattagatggcgcatctga

SEQ ID NO: 9382 - DNA, 36 bp, Artificial Sequence
  Synthetic oligonucleotide
gacgcaggactcggacgtaagggagcacaccatcga

SEQ ID NO: 9383 - DNA, 37 bp, Artificial Sequence
  Synthetic oligonucleotide
gatgacccaggtgctataaattacgcagatgtacgga

SEQ ID NO: 9384 - DNA, 38 bp, Artificial Sequence
  Synthetic oligonucleotide
gattaccgcagaacgggatactcatagtcgtaagttga

SEQ ID NO: 9385 - DNA, 38 bp, Artificial Sequence
  Synthetic oligonucleotide
gcaacacgccgacccagcgccatcgtccaccagactga

SEQ ID NO: 9386 - DNA, 36 bp, Artificial Sequence
  Synthetic oligonucleotide
gcacacagcaccactgcgtcactgaccaggccctta

SEQ ID NO: 9387 - DNA, 35 bp, Artificial Sequence
  Synthetic oligonucleotide
gcacacctcagttatgtcatgaaccgcactaaacc

SEQ ID NO: 9388 - DNA, 35 bp, Artificial Sequence
  Synthetic oligonucleotide
gcacatccaggactggacttcagtctactgtccgt

SEQ ID NO: 9389 - DNA, 37 bp, Artificial Sequence
  Synthetic oligonucleotide
gcatgtagcggtccgccggtcatcagggacatctgga

SEQ ID NO: 9390 - DNA, 37 bp, Artificial Sequence
  Synthetic oligonucleotide
gccaagtggagggatgaaagggtaattcagaggagga

SEQ ID NO: 9391 - DNA, 35 bp, Artificial Sequence
  Synthetic oligonucleotide
gccacgatccagtttatcgagtcgaagcccgcgac

SEQ ID NO: 9392 - DNA, 37 bp, Artificial Sequence
  Synthetic oligonucleotide
gccatgccgcggtcgtcaatgttaatcttgtcttgga

SEQ ID NO: 9393 - DNA, 34 bp, Artificial Sequence
  Synthetic oligonucleotide
gccgagccaccacgctctatctcgctccacatac

SEQ ID NO: 9394 - DNA, 38 bp, Artificial Sequence
  Synthetic oligonucleotide
gcgacactcggagcacggtgcaattcctggcttgttga

SEQ ID NO: 9395 - DNA, 38 bp, Artificial Sequence
  Synthetic oligonucleotide
gctacagccataagacaccacgatgaagtgaggcgtga

SEQ ID NO: 9396 - DNA, 38 bp, Artificial Sequence
  Synthetic oligonucleotide
gtggacatgaaacccctgtataagttgaggcattgtga

SEQ ID NO: 9397 - DNA, 36 bp, Artificial Sequence
  Synthetic oligonucleotide
tacgcaccacgcccctccttggtaacagtgatttta

SEQ ID NO: 9398 - DNA, 35 bp, Artificial Sequence
  Synthetic oligonucleotide
tcatacgcaggggtcaacgtagtgcaaatggggtc

SEQ ID NO: 9399 - DNA, 36 bp, Artificial Sequence
  Synthetic oligonucleotide
tcccaccgcagacgcctgtacccaaaccccatctta

SEQ ID NO: 9400 - DNA, 35 bp, Artificial Sequence
  Synthetic oligonucleotide
tgacggaccggtcaatgtagtgccaagtccctgac

SEQ ID NO: 9401 - DNA, 35 bp, Artificial Sequence
  Synthetic oligonucleotide
tgtcacgcacagaaacgaatgtgcctgtccatgta

SEQ ID NO: 9402 - DNA, 37 bp, Artificial Sequence
  Synthetic oligonucleotide
ttgcggggcggaacaatgaagtcgtgtgacctgccga

SEQ ID NO: 9403 - DNA, 35 bp, Artificial Sequence
  Synthetic oligonucleotide
aacctccgcgctggtgaacaagctcttgcttccaa

SEQ ID NO: 9404 - DNA, 37 bp, Artificial Sequence
  Synthetic oligonucleotide
acaccccgcgcagatagcctttaagagggactcacga

SEQ ID NO: 9405 - DNA, 35 bp, Artificial Sequence
  Synthetic oligonucleotide
acacccggccgacaataagaaagcataaaccccag

SEQ ID NO: 9406 - DNA, 36 bp, Artificial Sequence
  Synthetic oligonucleotide
acatgcccagagactcgtaacgtcagcaaggaacga

SEQ ID NO: 9407 - DNA, 38 bp, Artificial Sequence
  Synthetic oligonucleotide
acgacacggcctgaaccctagtcgaggagtcatggtga

SEQ ID NO: 9408 - DNA, 37 bp, Artificial Sequence
  Synthetic oligonucleotide
agcacggacggtggtatttgttgtcgtcacgcacaga

SEQ ID NO: 9409 - DNA, 38 bp, Artificial Sequence
  Synthetic oligonucleotide
agtgaagccgcagctgggctataccaccttcctcttga

SEQ ID NO: 9410 - DNA, 35 bp, Artificial Sequence
  Synthetic oligonucleotide
caacgcacgccacacattaccatgctctgaatagt

SEQ ID NO: 9411 - DNA, 35 bp, Artificial Sequence
  Synthetic oligonucleotide
ctcgcaacctcatcacactcgagtgtcggcgagaa

SEQ ID NO: 9412 - DNA, 36 bp, Artificial Sequence
  Synthetic oligonucleotide
gaccgccacatggagtcacgtttagcactcttgcga

SEQ ID NO: 9413 - DNA, 38 bp, Artificial Sequence
  Synthetic oligonucleotide
gacgaacgccggaacgtaatgtgatcgcccgcccctga

SEQ ID NO: 9414 - DNA, 38 bp, Artificial Sequence
  Synthetic oligonucleotide
gacgaaggctgcacgtcttagcaccggctctcacttga

SEQ ID NO: 9415 - DNA, 38 bp, Artificial Sequence
  Synthetic oligonucleotide
gacgcgaacgggtagagattaaagtgacacgcaactga

SEQ ID NO: 9416 - DNA, 35 bp, Artificial Sequence
  Synthetic oligonucleotide
gacgcggcccccgttatcccgttctaaaaccgctc

SEQ ID NO: 9417 - DNA, 36 bp, Artificial Sequence
  Synthetic oligonucleotide
gaggacccgcaggcttgtcaactgccacctttagaa

SEQ ID NO: 9418 - DNA, 35 bp, Artificial Sequence
  Synthetic oligonucleotide
gatgccggttgcctcacacacttaacttttgtaag

SEQ ID NO: 9419 - DNA, 38 bp, Artificial Sequence
  Synthetic oligonucleotide
gatgcgcaccctgctttgttttgttctactgacggtga

SEQ ID NO: 9420 - DNA, 35 bp, Artificial Sequence
  Synthetic oligonucleotide
gcaacgctgcacaaaaaaaccattcttgtttggat

SEQ ID NO: 9421 - DNA, 38 bp, Artificial Sequence
  Synthetic oligonucleotide
gcacaaccgatctattacgcacccacacccgtcgctga

SEQ ID NO: 9422 - DNA, 35 bp, Artificial Sequence
  Synthetic oligonucleotide
gcaccacagaccccgctggataagactggaccccg

SEQ ID NO: 9423 - DNA, 38 bp, Artificial Sequence
  Synthetic oligonucleotide
gccatagcccaactggtagaaactgagctccacgatga

SEQ ID NO: 9424 - DNA, 36 bp, Artificial Sequence
  Synthetic oligonucleotide
gccgtgtcgagcgactgtcgagaagttaacgaatca

SEQ ID NO: 9425 - DNA, 35 bp, Artificial Sequence
  Synthetic oligonucleotide
gctgacaaccgcctcacctatcaaaccagacaatc

SEQ ID NO: 9426 - DNA, 35 bp, Artificial Sequence
  Synthetic oligonucleotide
gtagtacgccgccatcgcagtcacattattttcca

SEQ ID NO: 9427 - DNA, 38 bp, Artificial Sequence
  Synthetic oligonucleotide
gtgagcacggcaaaagagggctgttgagtaccggttga

SEQ ID NO: 9428 - DNA, 35 bp, Artificial Sequence
  Synthetic oligonucleotide
gtgcgacaacagccgttagtgctttcagaaaagta

SEQ ID NO: 9429 - DNA, 36 bp, Artificial Sequence
  Synthetic oligonucleotide
gtggggatgctgcctgtacccctgtgttaagcgata

SEQ ID NO: 9430 - DNA, 36 bp, Artificial Sequence
  Synthetic oligonucleotide
tacacccgacgacggcgctccggccaatgctgttca

SEQ ID NO: 9431 - DNA, 38 bp, Artificial Sequence
  Synthetic oligonucleotide
tatgcaacgcgcctatacgaccgaagagaggtttctga

SEQ ID NO: 9432 - DNA, 35 bp, Artificial Sequence
  Synthetic oligonucleotide
tccagccaaggttcattcaggtcggtgctttccct

SEQ ID NO: 9433 - DNA, 36 bp, Artificial Sequence
  Synthetic oligonucleotide
tgaccgaacaggcccagtgataggtacacgttagca

SEQ ID NO: 9434 - DNA, 38 bp, Artificial Sequence
  Synthetic oligonucleotide
tgccacatggcaggatggaaagggacaagtgtcgttga

SEQ ID NO: 9435 - DNA, 37 bp, Artificial Sequence
  Synthetic oligonucleotide
aaccacctcacaacgaccgccgacgtagccctttgga

SEQ ID NO: 9436 - DNA, 35 bp, Artificial Sequence
  Synthetic oligonucleotide
acaccacggaatcgggcatccggtaaccgcataat

SEQ ID NO: 9437 - DNA, 38 bp, Artificial Sequence
  Synthetic oligonucleotide
agtcactgccccacacaacacccttaattcgggagtga

SEQ ID NO: 9438 - DNA, 37 bp, Artificial Sequence
  Synthetic oligonucleotide
atccacccgcacctatggaattacgctgaagcatgga

SEQ ID NO: 9439 - DNA, 35 bp, Artificial Sequence
  Synthetic oligonucleotide
atgcacgccagagtgggcaaaggcacaaaggatag

SEQ ID NO: 9440 - DNA, 38 bp, Artificial Sequence
  Synthetic oligonucleotide
ctcacgcgtacgtgctgcaacaagaagtaggtgtatga

SEQ ID NO: 9441 - DNA, 36 bp, Artificial Sequence
  Synthetic oligonucleotide
gaacggaagtagggacggaacgcgagatcgtccaaa

SEQ ID NO: 9442 - DNA, 35 bp, Artificial Sequence
  Synthetic oligonucleotide
gacaacgcagtgtttattgcgaatcgttcatcgct

SEQ ID NO: 9443 - DNA, 36 bp, Artificial Sequence
  Synthetic oligonucleotide
gacacgcaatgttgtgccccagcgccctgacgatca

SEQ ID NO: 9444 - DNA, 35 bp, Artificial Sequence
  Synthetic oligonucleotide
gacatcgcaggcctgccgaatcaagctcttgagtt

SEQ ID NO: 9445 - DNA, 35 bp, Artificial Sequence
  Synthetic oligonucleotide
gaccagccgactgctaacaatccatgacttaccgt

SEQ ID NO: 9446 - DNA, 35 bp, Artificial Sequence
  Synthetic oligonucleotide
gaccgatcactagcctagtgctgcctaatctcgct

SEQ ID NO: 9447 - DNA, 38 bp, Artificial Sequence
  Synthetic oligonucleotide
gagaccccgatctgagatataacggtggtcacgactga

SEQ ID NO: 9448 - DNA, 36 bp, Artificial Sequence
  Synthetic oligonucleotide
gagacgtccagggaacgagaagatgccgtaacgtaa

SEQ ID NO: 9449 - DNA, 35 bp, Artificial Sequence
  Synthetic oligonucleotide
gcaaccacaccgatcgagttaactagagacgggtg

SEQ ID NO: 9450 - DNA, 38 bp, Artificial Sequence
  Synthetic oligonucleotide
gccaaaccgtcacagtgaggatttacggtacgttgtga

SEQ ID NO: 9451 - DNA, 37 bp, Artificial Sequence
  Synthetic oligonucleotide
gccacaacagacgcatcacgatccgaaggatgtccga

SEQ ID NO: 9452 - DNA, 35 bp, Artificial Sequence
  Synthetic oligonucleotide
gccagaccagatatgtagtatggtacgctgcattt

SEQ ID NO: 9453 - DNA, 35 bp, Artificial Sequence
  Synthetic oligonucleotide
gtcacagctcgacactttccttatcgccactatat

SEQ ID NO: 9454 - DNA, 36 bp, Artificial Sequence
  Synthetic oligonucleotide
tacaccgccccatgccgtttccatccccgagagaga

SEQ ID NO: 9455 - DNA, 37 bp, Artificial Sequence
  Synthetic oligonucleotide
taccgacgggagggatctcagtaataagagtggtaga

SEQ ID NO: 9456 - DNA, 36 bp, Artificial Sequence
  Synthetic oligonucleotide
tcaaccagcccgactagaatctttacaggctcgaga

SEQ ID NO: 9457 - DNA, 35 bp, Artificial Sequence
  Synthetic oligonucleotide
tcacacgaccatcaggtggaagcagggactggacc

SEQ ID NO: 9458 - DNA, 36 bp, Artificial Sequence
  Synthetic oligonucleotide
tctgcatcacgcactgttgtcaatcgttataaatta

SEQ ID NO: 9459 - DNA, 36 bp, Artificial Sequence
  Synthetic oligonucleotide
tgaccacccgaaatagacgcaaacagggctcacaca

SEQ ID NO: 9460 - DNA, 36 bp, Artificial Sequence
  Synthetic oligonucleotide
tgcaacgcggacaggtcagtacgttactcggctaca

SEQ ID NO: 9461 - DNA, 37 bp, Artificial Sequence
  Synthetic oligonucleotide
ttgggaggccagtggtggtttaagcggtagaatagga

SEQ ID NO: 9462 - DNA, 35 bp, Artificial Sequence
  Synthetic oligonucleotide
aaacaatcgcaggactcaactaaactcgctgagag

SEQ ID NO: 9463 - DNA, 38 bp, Artificial Sequence
  Synthetic oligonucleotide
aagcacccggacaaatgagctcccgggacgtctattga

SEQ ID NO: 9464 - DNA, 35 bp, Artificial Sequence
  Synthetic oligonucleotide
acaaaccgccaacaacccagcatgtcggacacgag

SEQ ID NO: 9465 - DNA, 36 bp, Artificial Sequence
  Synthetic oligonucleotide
acacacgcgcaagtgggtactcccaaggaacaccaa

SEQ ID NO: 9466 - DNA, 36 bp, Artificial Sequence
  Synthetic oligonucleotide
acagccagaagcgtacgcgtactggggtacgttaaa

SEQ ID NO: 9467 - DNA, 38 bp, Artificial Sequence
  Synthetic oligonucleotide
accaagggcgcgaaggtgaatggatggtcgtactctga

SEQ ID NO: 9468 - DNA, 35 bp, Artificial Sequence
  Synthetic oligonucleotide
acccactgaccccgctcgctgtttccaaacagctt

SEQ ID NO: 9469 - DNA, 36 bp, Artificial Sequence
  Synthetic oligonucleotide
acgcacccagcggacgtacgacatgtcccatatgca

SEQ ID NO: 9470 - DNA, 37 bp, Artificial Sequence
  Synthetic oligonucleotide
acgtgcaagggaaacaggctgttgatgagagagtcga

SEQ ID NO: 9471 - DNA, 35 bp, Artificial Sequence
  Synthetic oligonucleotide
atcgtgcacagggtattgaaagcgattgggatcgg

SEQ ID NO: 9472 - DNA, 36 bp, Artificial Sequence
  Synthetic oligonucleotide
cacccgcttacctcaccgacgggttttgctacctaa

SEQ ID NO: 9473 - DNA, 35 bp, Artificial Sequence
  Synthetic oligonucleotide
cacgtgcgtcttgcattagaggacgaaagcaacta

SEQ ID NO: 9474 - DNA, 37 bp, Artificial Sequence
  Synthetic oligonucleotide
gacaaggccagactcggtaaccgtggacagggattga

SEQ ID NO: 9475 - DNA, 38 bp, Artificial Sequence
  Synthetic oligonucleotide
gacgaagggtcacagctgaataacaaccgtctaggtga

SEQ ID NO: 9476 - DNA, 38 bp, Artificial Sequence
  Synthetic oligonucleotide
gacgcacgtcgcgtagtgcagcacgttcagtcaattaa

SEQ ID NO: 9477 - DNA, 37 bp, Artificial Sequence
  Synthetic oligonucleotide
gacgccgtcccagcggtgtctgcgtgctgccgaggga

SEQ ID NO: 9478 - DNA, 35 bp, Artificial Sequence
  Synthetic oligonucleotide
gacggaccaaacggcacgtaccaagtattggacca

SEQ ID NO: 9479 - DNA, 35 bp, Artificial Sequence
  Synthetic oligonucleotide
gagaccaccccctcaaggccatcgcggactttcag

SEQ ID NO: 9480 - DNA, 36 bp, Artificial Sequence
  Synthetic oligonucleotide
gagccacagacaggcaccatcgaggcgaaggattaa

SEQ ID NO: 9481 - DNA, 36 bp, Artificial Sequence
  Synthetic oligonucleotide
gcacacgcgcactcctgttgtctttagacgcatcga

SEQ ID NO: 9482 - DNA, 37 bp, Artificial Sequence
  Synthetic oligonucleotide
gcactgagcggttccagggtaaaagttccagcttcga

SEQ ID NO: 9483 - DNA, 35 bp, Artificial Sequence
  Synthetic oligonucleotide
gcatcaagcccgcccggacgtagtagggtgttctt

SEQ ID NO: 9484 - DNA, 35 bp, Artificial Sequence
  Synthetic oligonucleotide
gcgcacgatcgcaaaggggaaaacgaagaactgtt

SEQ ID NO: 9485 - DNA, 35 bp, Artificial Sequence
  Synthetic oligonucleotide
gcgtgcaccccaccaccttaccgagcccaggacga

SEQ ID NO: 9486 - DNA, 37 bp, Artificial Sequence
  Synthetic oligonucleotide
ggtgaaggctcgaccgataatgaaggaatcaccacga

SEQ ID NO: 9487 - DNA, 35 bp, Artificial Sequence
  Synthetic oligonucleotide
gtgagccgtagccgttctaaacaccgtgtttcacg

SEQ ID NO: 9488 - DNA, 36 bp, Artificial Sequence
  Synthetic oligonucleotide
gtgctacagcatgagtaacggctggggatgagcaaa

SEQ ID NO: 9489 - DNA, 35 bp, Artificial Sequence
  Synthetic oligonucleotide
gtggagtgcggttgaggaatgataacgtcgagggt

SEQ ID NO: 9490 - DNA, 36 bp, Artificial Sequence
  Synthetic oligonucleotide
gttgccacccagaccccgtcaactaaccccgttcaa

SEQ ID NO: 9491 - DNA, 35 bp, Artificial Sequence
  Synthetic oligonucleotide
taactgcacaaggctactaacacactaaccccacg

SEQ ID NO: 9492 - DNA, 35 bp, Artificial Sequence
  Synthetic oligonucleotide
taagccagtgcgtgactgacacatctagtttaacg

SEQ ID NO: 9493 - DNA, 36 bp, Artificial Sequence
  Synthetic oligonucleotide
tatcaccgaacacttcttgccgcatgaccgtttcca

SEQ ID NO: 9494 - DNA, 38 bp, Artificial Sequence
  Synthetic oligonucleotide
tgagccccggccaagtgtgtcccaacactataacgtga

SEQ ID NO: 9495 - DNA, 37 bp, Artificial Sequence
  Synthetic oligonucleotide
aacaacgagcgcagttcataaaacgacacttaaagga

SEQ ID NO: 9496 - DNA, 35 bp, Artificial Sequence
  Synthetic oligonucleotide
aacgacaggcgagggttgtgattgcgtggtcacat

SEQ ID NO: 9497 - DNA, 38 bp, Artificial Sequence
  Synthetic oligonucleotide
acacacgccagtgctgtgcagaagagtcggaggattga

SEQ ID NO: 9498 - DNA, 35 bp, Artificial Sequence
  Synthetic oligonucleotide
acacccgggggatcctgccacagccagcttatcct

SEQ ID NO: 9499 - DNA, 37 bp, Artificial Sequence
  Synthetic oligonucleotide
accacacactcacgcccgtactattgtgtcttatcga

SEQ ID NO: 9500 - DNA, 36 bp, Artificial Sequence
  Synthetic oligonucleotide
gaaccgccgcagaaccgtgttacatagacacggaca

SEQ ID NO: 9501 - DNA, 37 bp, Artificial Sequence
  Synthetic oligonucleotide
gacatgccagatgtccactacgcctcgctcaactaga

SEQ ID NO: 9502 - DNA, 35 bp, Artificial Sequence
  Synthetic oligonucleotide
gacgtcgcacaggacataaaattgctagattggct

SEQ ID NO: 9503 - DNA, 37 bp, Artificial Sequence
  Synthetic oligonucleotide
gacgtgagaggaacgaagacaggagtcgagtccagga

SEQ ID NO: 9504 - DNA, 35 bp, Artificial Sequence
  Synthetic oligonucleotide
gagccaacccgacctcggcataactcgcccggctc

SEQ ID NO: 9505 - DNA, 36 bp, Artificial Sequence
  Synthetic oligonucleotide
gatgcaaaatgtggtatataggtgaaaggggttgta

SEQ ID NO: 9506 - DNA, 35 bp, Artificial Sequence
  Synthetic oligonucleotide
gatgctccaaaggactcttagaatagacgcgtacc

SEQ ID NO: 9507 - DNA, 35 bp, Artificial Sequence
  Synthetic oligonucleotide
gcaaagcaaagcgccacgacaccgagtattttttt

SEQ ID NO: 9508 - DNA, 37 bp, Artificial Sequence
  Synthetic oligonucleotide
gcaacacgaactgcgcaataggtgacggttgcaggga

SEQ ID NO: 9509 - DNA, 36 bp, Artificial Sequence
  Synthetic oligonucleotide
gcagaccaaggaacgctaacacatggaagtttggca

SEQ ID NO: 9510 - DNA, 35 bp, Artificial Sequence
  Synthetic oligonucleotide
gccgcacatcagacactttctaccgcttttcacac

SEQ ID NO: 9511 - DNA, 36 bp, Artificial Sequence
  Synthetic oligonucleotide
gctacacaaccgcgtatctgtcatgagcacacatta

SEQ ID NO: 9512 - DNA, 35 bp, Artificial Sequence
  Synthetic oligonucleotide
gctgagccacgtagcttccggctgtaatttatcct

SEQ ID NO: 9513 - DNA, 35 bp, Artificial Sequence
  Synthetic oligonucleotide
gtgaccgagcgccaatggtatccgtagagtcaagg

SEQ ID NO: 9514 - DNA, 37 bp, Artificial Sequence
  Synthetic oligonucleotide
gtggaacgaagacgtgccgtagactgacgatgttaga

SEQ ID NO: 9515 - DNA, 38 bp, Artificial Sequence
  Synthetic oligonucleotide
tacgcgtacatgcctatgacccttagtgaccccggtga

SEQ ID NO: 9516 - DNA, 35 bp, Artificial Sequence
  Synthetic oligonucleotide
tcaaccacacagtattctagtagcgtacaatatca

SEQ ID NO: 9517 - DNA, 35 bp, Artificial Sequence
  Synthetic oligonucleotide
tgaacccgagggaagacagggtacattccacctct

SEQ ID NO: 9518 - DNA, 38 bp, Artificial Sequence
  Synthetic oligonucleotide
tgacgctgcactccctgaagtagtaccagttttgctga

SEQ ID NO: 9519 - DNA, 37 bp, Artificial Sequence
  Synthetic oligonucleotide
tgagcccacgaaagctgagttttagctagtgcggaga

SEQ ID NO: 9520 - DNA, 35 bp, Artificial Sequence
  Synthetic oligonucleotide
aacgcgcaaggtccacccgtccgagaacacaactg

SEQ ID NO: 9521 - DNA, 35 bp, Artificial Sequence
  Synthetic oligonucleotide
aactgcgcagagagggtttgtcgccaagtcactag

SEQ ID NO: 9522 - DNA, 37 bp, Artificial Sequence
  Synthetic oligonucleotide
acaacgccggatggactacttagcttgtacgttttga

SEQ ID NO: 9523 - DNA, 35 bp, Artificial Sequence
  Synthetic oligonucleotide
acaacgggctgccagacctggttgtatattgccta

SEQ ID NO: 9524 - DNA, 37 bp, Artificial Sequence
  Synthetic oligonucleotide
acatgcatccgctcaattgtgacttacggcttggtga

SEQ ID NO: 9525 - DNA, 36 bp, Artificial Sequence
  Synthetic oligonucleotide
acctaccgcgagccggggcgtagtaaaggatcaata

SEQ ID NO: 9526 - DNA, 37 bp, Artificial Sequence
  Synthetic oligonucleotide
acgcaaggcctaacactgaccccgatgtaagttccga

SEQ ID NO: 9527 - DNA, 36 bp, Artificial Sequence
  Synthetic oligonucleotide
atcaccggacggattgtgagcgcggtaagtgctgaa

SEQ ID NO: 9528 - DNA, 35 bp, Artificial Sequence
  Synthetic oligonucleotide
atgcccccagcaccggacattgcgctttaaccatg

SEQ ID NO: 9529 - DNA, 36 bp, Artificial Sequence
  Synthetic oligonucleotide
cctagcctcatcgcagatgcgacgatagttggatca

SEQ ID NO: 9530 - DNA, 38 bp, Artificial Sequence
  Synthetic oligonucleotide
cgtggtgcgtagaccctggagagaacgggcaatgttga

SEQ ID NO: 9531 - DNA, 37 bp, Artificial Sequence
  Synthetic oligonucleotide
gacacagccgctgaacaacgttatcgaacccgacgga

SEQ ID NO: 9532 - DNA, 37 bp, Artificial Sequence
  Synthetic oligonucleotide
gacacggacaaaagtgtctgagttagtctgggtgaga

SEQ ID NO: 9533 - DNA, 36 bp, Artificial Sequence
  Synthetic oligonucleotide
gaccaggcgcaggctaaccgaaaccgtaacaataaa

SEQ ID NO: 9534 - DNA, 37 bp, Artificial Sequence
  Synthetic oligonucleotide
gacgcatcgggtctacatggaagcagtccgagacaga

SEQ ID NO: 9535 - DNA, 35 bp, Artificial Sequence
  Synthetic oligonucleotide
gacgcccatccgaagcctgcgagagaacggatcac

SEQ ID NO: 9536 - DNA, 32 bp, Artificial Sequence
  Synthetic oligonucleotide
gacggaacatacacacatgagatggaccgtac

SEQ ID NO: 9537 - DNA, 37 bp, Artificial Sequence
  Synthetic oligonucleotide
gatggacaaactggtgtatggtttcgacggtgcggga

SEQ ID NO: 9538 - DNA, 37 bp, Artificial Sequence
  Synthetic oligonucleotide
gcacacagcccatgttaatgctgcaagaagtgacaga

SEQ ID NO: 9539 - DNA, 36 bp, Artificial Sequence
  Synthetic oligonucleotide
gcacgaagaagtcaaggtcttcaatcaagcctggta

SEQ ID NO: 9540 - DNA, 35 bp, Artificial Sequence
  Synthetic oligonucleotide
gccgcaggcatagagggttggggtgggcattgtta

SEQ ID NO: 9541 - DNA, 37 bp, Artificial Sequence
  Synthetic oligonucleotide
gccgcccccacagtgtggacgatcccaatcggcaaga

SEQ ID NO: 9542 - DNA, 35 bp, Artificial Sequence
  Synthetic oligonucleotide
gtcgaacgcacaaatgtacacacgatctcaaacat

SEQ ID NO: 9543 - DNA, 38 bp, Artificial Sequence
  Synthetic oligonucleotide
gtgtgccggacaatgcggcaagatttaaatcggtatga

SEQ ID NO: 9544 - DNA, 36 bp, Artificial Sequence
  Synthetic oligonucleotide
tacaccgcgtgggattcgctgcatgagcctggtaca

SEQ ID NO: 9545 - DNA, 36 bp, Artificial Sequence
  Synthetic oligonucleotide
taccagcacacatcggctttaggacacgagtggata

SEQ ID NO: 9546 - DNA, 36 bp, Artificial Sequence
  Synthetic oligonucleotide
tcacaggacacgcgctatcaaaagcctgtttgttaa

SEQ ID NO: 9547 - DNA, 35 bp, Artificial Sequence
  Synthetic oligonucleotide
tcagtcagcctacactctattcgtcaattcgtccc

SEQ ID NO: 9548 - DNA, 36 bp, Artificial Sequence
  Synthetic oligonucleotide
tccacccatccaccctacccgacggccgttacctga

SEQ ID NO: 9549 - DNA, 36 bp, Artificial Sequence
  Synthetic oligonucleotide
tcccagagcggactgtggctattcgcccgtataaga

SEQ ID NO: 9550 - DNA, 36 bp, Artificial Sequence
  Synthetic oligonucleotide
tccgatgcgtacagctaggccagaggcacaggtcaa

SEQ ID NO: 9551 - DNA, 36 bp, Artificial Sequence
  Synthetic oligonucleotide
tctaccaccgcgagttcaatgggacagattccagga

SEQ ID NO: 9552 - DNA, 35 bp, Artificial Sequence
  Synthetic oligonucleotide
tgacgcaccgcagactcacactagcttgcgtcggt

SEQ ID NO: 9553 - DNA, 35 bp, Artificial Sequence
  Synthetic oligonucleotide
ttgccgccaaaacgtacggaccccgatctatagcc

SEQ ID NO: 9554 - DNA, 37 bp, Artificial Sequence
  Synthetic oligonucleotide
aaccaccgcacatggagcaagagaggcaagcatagga

SEQ ID NO: 9555 - DNA, 34 bp, Artificial Sequence
  Synthetic oligonucleotide
acacgcaccggtctggcatcgagacagattggaa

SEQ ID NO: 9556 - DNA, 38 bp, Artificial Sequence
  Synthetic oligonucleotide
accaccgaccgatgcctcttcgacaacagtcgcgctga

SEQ ID NO: 9557 - DNA, 37 bp, Artificial Sequence
  Synthetic oligonucleotide
accaccggggagcgtatacggacaagcggcaccttga

SEQ ID NO: 9558 - DNA, 36 bp, Artificial Sequence
  Synthetic oligonucleotide
acccgcgcagttatcctagcatcttaccgtgatcga

SEQ ID NO: 9559 - DNA, 35 bp, Artificial Sequence
  Synthetic oligonucleotide
atccccacacgcaaccgaactgcaacatcgcacgt

SEQ ID NO: 9560 - DNA, 37 bp, Artificial Sequence
  Synthetic oligonucleotide
atgacgctggcggtaccggatgcccttcccaaaggga

SEQ ID NO: 9561 - DNA, 38 bp, Artificial Sequence
  Synthetic oligonucleotide
atgcgaggcggccctctcttgccgagtcttgatgttga

SEQ ID NO: 9562 - DNA, 36 bp, Artificial Sequence
  Synthetic oligonucleotide
atgcgcgacacgtatgtacgcgtaccgggttagcaa

SEQ ID NO: 9563 - DNA, 36 bp, Artificial Sequence
  Synthetic oligonucleotide
cacacaggcacggcaactgtgtacataccctgaata

SEQ ID NO: 9564 - DNA, 37 bp, Artificial Sequence
  Synthetic oligonucleotide
cacgcgatcgtcaaagtgtgtacaacaggatctttga

SEQ ID NO: 9565 - DNA, 38 bp, Artificial Sequence
  Synthetic oligonucleotide
gaacacagctggtatacgtttgatcccgtgcaccgtga

SEQ ID NO: 9566 - DNA, 38 bp, Artificial Sequence
  Synthetic oligonucleotide
gaacgtccacagcagacggcacctcgcgacttcagtga

SEQ ID NO: 9567 - DNA, 37 bp, Artificial Sequence
  Synthetic oligonucleotide
gacacacgcggaagcgaaacgaacccatgtgacgtga

SEQ ID NO: 9568 - DNA, 37 bp, Artificial Sequence
  Synthetic oligonucleotide
gaccaagcacgaggggcacgagtagtacaccgcatga

SEQ ID NO: 9569 - DNA, 37 bp, Artificial Sequence
  Synthetic oligonucleotide
gccggtacggtcacattaagcaggacgaggttctgga

SEQ ID NO: 9570 - DNA, 35 bp, Artificial Sequence
  Synthetic oligonucleotide
gcgtaggcacggtctgacaagtagcgttttgcact

SEQ ID NO: 9571 - DNA, 35 bp, Artificial Sequence
  Synthetic oligonucleotide
gtgcgaagccaactgtcatagcgacgccatccaac

SEQ ID NO: 9572 - DNA, 35 bp, Artificial Sequence
  Synthetic oligonucleotide
tacacgctcgaccatgagactggacaagtcgatat

SEQ ID NO: 9573 - DNA, 36 bp, Artificial Sequence
  Synthetic oligonucleotide
tgacatgccaacgctgatgcattacatcaccccata

SEQ ID NO: 9574 - DNA, 37 bp, Artificial Sequence
  Synthetic oligonucleotide
tgcggacgcaacgggtatttatcgcattctgtgtaga

SEQ ID NO: 9575 - DNA, 36 bp, Artificial Sequence
  Synthetic oligonucleotide
ttgtgcacaagtaaacacttccccgttgatgttgta

SEQ ID NO: 9576 - DNA, 37 bp, Artificial Sequence
  Synthetic oligonucleotide
aacacacatccgacttcttaccgggccagtacgccga

SEQ ID NO: 9577 - DNA, 35 bp, Artificial Sequence
  Synthetic oligonucleotide
accaccgcatgtcaaggcgtaattgccagacgaaa

SEQ ID NO: 9578 - DNA, 37 bp, Artificial Sequence
  Synthetic oligonucleotide
atcgtgcgccgattgcatgctaaccatcgtactctga

SEQ ID NO: 9579 - DNA, 35 bp, Artificial Sequence
  Synthetic oligonucleotide
gacacactaggtcctctccgtatgatctggtcctg

SEQ ID NO: 9580 - DNA, 35 bp, Artificial Sequence
  Synthetic oligonucleotide
gacaccgcaaatggaatcggacatgtagtgccttg

SEQ ID NO: 9581 - DNA, 35 bp, Artificial Sequence
  Synthetic oligonucleotide
gacagatcagcaacacggattacacctccaccgag

SEQ ID NO: 9582 - DNA, 35 bp, Artificial Sequence
  Synthetic oligonucleotide
gaccaagcaaagttgggacttcgggctggtttgga

SEQ ID NO: 9583 - DNA, 37 bp, Artificial Sequence
  Synthetic oligonucleotide
gaccaagccgcaatcagcagaaccgctctatcgtgga

SEQ ID NO: 9584 - DNA, 38 bp, Artificial Sequence
  Synthetic oligonucleotide
gaccagcacgtacgcgaatggacataaactccctgtga

SEQ ID NO: 9585 - DNA, 38 bp, Artificial Sequence
  Synthetic oligonucleotide
gacgaggtcacgtgaagggaaacggcgtagtagtatga

SEQ ID NO: 9586 - DNA, 36 bp, Artificial Sequence
  Synthetic oligonucleotide
gacgcacaccgcatattcgcgaaccagactctggga

SEQ ID NO: 9587 - DNA, 37 bp, Artificial Sequence
  Synthetic oligonucleotide
gagacgatgcgggagttgagttagtgtacgcgtgtga

SEQ ID NO: 9588 - DNA, 37 bp, Artificial Sequence
  Synthetic oligonucleotide
gatcgaggcttaactatccgtcatccacagtacccga

SEQ ID NO: 9589 - DNA, 35 bp, Artificial Sequence
  Synthetic oligonucleotide
gcacacgcagtacggtttatatcgtccatgattcc

SEQ ID NO: 9590 - DNA, 35 bp, Artificial Sequence
  Synthetic oligonucleotide
gcacacgtggattccgtcaaccatgctcgttcctt

SEQ ID NO: 9591 - DNA, 35 bp, Artificial Sequence
  Synthetic oligonucleotide
gcacggacagaggcgttcaaacacacatgaatatg

SEQ ID NO: 9592 - DNA, 36 bp, Artificial Sequence
  Synthetic oligonucleotide
gcatccacaatactgcggtaacgcgtgctaactcta

SEQ ID NO: 9593 - DNA, 37 bp, Artificial Sequence
  Synthetic oligonucleotide
gccaagcgcggactgctaatcctcgaaacctacatga

SEQ ID NO: 9594 - DNA, 36 bp, Artificial Sequence
  Synthetic oligonucleotide
ggtacgaccggaactgcaattctgacgtcggtgtga

SEQ ID NO: 9595 - DNA, 36 bp, Artificial Sequence
  Synthetic oligonucleotide
ggtgtcgcacccgcaaccggtacagcatgacagaaa

SEQ ID NO: 9596 - DNA, 35 bp, Artificial Sequence
  Synthetic oligonucleotide
gtcagagcgacaggatgtaagaggaaaatgtttag

SEQ ID NO: 9597 - DNA, 37 bp, Artificial Sequence
  Synthetic oligonucleotide
gtccgtaggcgagagcgtagtaagaagtgcaggaaga

SEQ ID NO: 9598 - DNA, 37 bp, Artificial Sequence
  Synthetic oligonucleotide
gtcgagaggctagaaagggaatgggtggtctgggaga

SEQ ID NO: 9599 - DNA, 35 bp, Artificial Sequence
  Synthetic oligonucleotide
gtgcaacaagcccgactgtccgtgtacctaaacgt

SEQ ID NO: 9600 - DNA, 38 bp, Artificial Sequence
  Synthetic oligonucleotide
taacgcgccgtcccccccataaaaccagattttcgtga

SEQ ID NO: 9601 - DNA, 36 bp, Artificial Sequence
  Synthetic oligonucleotide
taccgaagcagtctagcgtcctgcggttcatgcaca

SEQ ID NO: 9602 - DNA, 35 bp, Artificial Sequence
  Synthetic oligonucleotide
tacgactcctaccccgactcctatgcaccctgacc

SEQ ID NO: 9603 - DNA, 37 bp, Artificial Sequence
  Synthetic oligonucleotide
tactgcgcgcgctccacatcgtccggaaacttcccga

SEQ ID NO: 9604 - DNA, 36 bp, Artificial Sequence
  Synthetic oligonucleotide
tagccagtccaggcatacatccgaatctagctatta

SEQ ID NO: 9605 - DNA, 35 bp, Artificial Sequence
  Synthetic oligonucleotide
tagtgcgcaacggtcatttagcgattctagacttt

SEQ ID NO: 9606 - DNA, 36 bp, Artificial Sequence
  Synthetic oligonucleotide
tcaccagtcactgtacgggtatataaacacattgga

SEQ ID NO: 9607 - DNA, 36 bp, Artificial Sequence
  Synthetic oligonucleotide
tcaccgatcacaaacaacctgtatggcagtcacata

SEQ ID NO: 9608 - DNA, 36 bp, Artificial Sequence
  Synthetic oligonucleotide
tccacatgctcaggagatccgattacgtagaacaaa

SEQ ID NO: 9609 - DNA, 36 bp, Artificial Sequence
  Synthetic oligonucleotide
tccgaggcgagcacatgcattcggactaatgctgga

SEQ ID NO: 9610 - DNA, 35 bp, Artificial Sequence
  Synthetic oligonucleotide
tgcatagtggcgtacggacaaggacacggttgaac

SEQ ID NO: 9611 - DNA, 35 bp, Artificial Sequence
  Synthetic oligonucleotide
tgcctcgcgcacccgtatacctctgcattatcgag

SEQ ID NO: 9612 - DNA, 35 bp, Artificial Sequence
  Synthetic oligonucleotide
tgcgcagagcaacgttacgcgactgatgaccctta

SEQ ID NO: 9613 - DNA, 36 bp, Artificial Sequence
  Synthetic oligonucleotide
tgtgcaaggtcaacaggatactgcagtaatatcgca

SEQ ID NO: 9614 - DNA, 36 bp, Artificial Sequence
  Synthetic oligonucleotide
ttcgccgcatggttgacacgctatctggggaagcca

SEQ ID NO: 9615 - DNA, 35 bp, Artificial Sequence
  Synthetic oligonucleotide
aaccgaccacacgtccagccatgctccacaacact

SEQ ID NO: 9616 - DNA, 36 bp, Artificial Sequence
  Synthetic oligonucleotide
aagccacaagcgttccatcggccccctgtcgttgca

SEQ ID NO: 9617 - DNA, 38 bp, Artificial Sequence
  Synthetic oligonucleotide
acaacgaagcataagcatctaggacaccaccttactga

SEQ ID NO: 9618 - DNA, 35 bp, Artificial Sequence
  Synthetic oligonucleotide
acacccacatgctgtgagacacccataatcgaaca

SEQ ID NO: 9619 - DNA, 35 bp, Artificial Sequence
  Synthetic oligonucleotide
accacaccaagcgtactgctcccgtaacggcacac

SEQ ID NO: 9620 - DNA, 35 bp, Artificial Sequence
  Synthetic oligonucleotide
acgcgctcaccccctgacagttacgaaaggcttaa

SEQ ID NO: 9621 - DNA, 37 bp, Artificial Sequence
  Synthetic oligonucleotide
actgcagacccagccaaccataatagacggtacttga

SEQ ID NO: 9622 - DNA, 38 bp, Artificial Sequence
  Synthetic oligonucleotide
gaagtcgcaaaccgtccaaaccgaccgacacaaagtga

SEQ ID NO: 9623 - DNA, 36 bp, Artificial Sequence
  Synthetic oligonucleotide
gacaacgtggctcaatgcagttacaaggggaacgaa

SEQ ID NO: 9624 - DNA, 35 bp, Artificial Sequence
  Synthetic oligonucleotide
gaccagcacagcggacatgcgtatcacgtgatgga

SEQ ID NO: 9625 - DNA, 35 bp, Artificial Sequence
  Synthetic oligonucleotide
gacgcccacgttcagcgagcatggtactgcttcag

SEQ ID NO: 9626 - DNA, 35 bp, Artificial Sequence
  Synthetic oligonucleotide
gatgtcgccgacttctagtgtgcacttgcatactt

SEQ ID NO: 9627 - DNA, 36 bp, Artificial Sequence
  Synthetic oligonucleotide
gccatccccggtacgatgtaactggtttgcataccg

SEQ ID NO: 9628 - DNA, 35 bp, Artificial Sequence
  Synthetic oligonucleotide
gcccagtaccagggcacagtatatggaagttgcat

SEQ ID NO: 9629 - DNA, 36 bp, Artificial Sequence
  Synthetic oligonucleotide
gccgaaaggccgccccaaccgttattcctgtactca

SEQ ID NO: 9630 - DNA, 35 bp, Artificial Sequence
  Synthetic oligonucleotide
ggacacacgcacgtatcacgtatcccggctgccac

SEQ ID NO: 9631 - DNA, 38 bp, Artificial Sequence
  Synthetic oligonucleotide
gtcacgtgcacaagatcgtaaaggtggactggatgtga

SEQ ID NO: 9632 - DNA, 36 bp, Artificial Sequence
  Synthetic oligonucleotide
tacaccggcaatgggtacagactggttgtggcataa

SEQ ID NO: 9633 - DNA, 37 bp, Artificial Sequence
  Synthetic oligonucleotide
tatgccacagaactctgtcagtaacaagggcattcta

SEQ ID NO: 9634 - DNA, 35 bp, Artificial Sequence
  Synthetic oligonucleotide
tcacgcgggacgtgggcgtgaacaaattcgaatgt

SEQ ID NO: 9635 - DNA, 36 bp, Artificial Sequence
  Synthetic oligonucleotide
tcacgtcgaactcccccgtgagcccactgccgaaca

SEQ ID NO: 9636 - DNA, 36 bp, Artificial Sequence
  Synthetic oligonucleotide
tcatgccgcataaccaaatcgtgtaacgcctgaact

SEQ ID NO: 9637 - DNA, 36 bp, Artificial Sequence
  Synthetic oligonucleotide
tgacaagcaccggtcactctctgcgcccgtcacgca

SEQ ID NO: 9638 - DNA, 38 bp, Artificial Sequence
  Synthetic oligonucleotide
tgagacgtcatgaggaggaagggcatctttcgttttga

SEQ ID NO: 9639 - DNA, 37 bp, Artificial Sequence
  Synthetic oligonucleotide
tgatgcggaagatgcgacggggtactggccaagccga

SEQ ID NO: 9640 - DNA, 38 bp, Artificial Sequence
  Synthetic oligonucleotide
acatgcacccgcgacgggttttgactaccttgaattga

SEQ ID NO: 9641 - DNA, 35 bp, Artificial Sequence
  Synthetic oligonucleotide
accacccagcagtccattatgcctttcgtacttac

SEQ ID NO: 9642 - DNA, 35 bp, Artificial Sequence
  Synthetic oligonucleotide
accgaccattacgacggaaggttattcgggggtac

SEQ ID NO: 9643 - DNA, 38 bp, Artificial Sequence
  Synthetic oligonucleotide
atgacatgcagcaagtgatcgttcctgaccccgattga

SEQ ID NO: 9644 - DNA, 35 bp, Artificial Sequence
  Synthetic oligonucleotide
gaaacccaaccggtccagggacaccatagcgcatc

SEQ ID NO: 9645 - DNA, 36 bp, Artificial Sequence
  Synthetic oligonucleotide
gaacccaacagccagccagaactggatgcttagtca

SEQ ID NO: 9646 - DNA, 38 bp, Artificial Sequence
  Synthetic oligonucleotide
gacacccgtcgcgccgtctaccacgagttctggtctga

SEQ ID NO: 9647 - DNA, 35 bp, Artificial Sequence
  Synthetic oligonucleotide
gacacgaacagttcgtgattcttgtccttctcttt

SEQ ID NO: 9648 - DNA, 35 bp, Artificial Sequence
  Synthetic oligonucleotide
gacacgcaccgagtcattgcaactcacactagttt

SEQ ID NO: 9649 - DNA, 36 bp, Artificial Sequence
  Synthetic oligonucleotide
gacagacgggagggtgcgcataaggctgtacacgta

SEQ ID NO: 9650 - DNA, 35 bp, Artificial Sequence
  Synthetic oligonucleotide
gacaggatgcgaaagtggcatggactgtccgctgg

SEQ ID NO: 9651 - DNA, 36 bp, Artificial Sequence
  Synthetic oligonucleotide
gaccaccagcgaaagcatctgcacacgaccaccaca

SEQ ID NO: 9652 - DNA, 36 bp, Artificial Sequence
  Synthetic oligonucleotide
gacgcatgcaagaaaagcacgtcttgttgggacaaa

SEQ ID NO: 9653 - DNA, 36 bp, Artificial Sequence
  Synthetic oligonucleotide
gagcccatcggacgtatccgtaatatcaggtcggga

SEQ ID NO: 9654 - DNA, 36 bp, Artificial Sequence
  Synthetic oligonucleotide
gatacacccagtcatattagaatgcaacgtatctca

SEQ ID NO: 9655 - DNA, 35 bp, Artificial Sequence
  Synthetic oligonucleotide
gcaccacgcggcaaatcctgagcgagcgcaattca

SEQ ID NO: 9656 - DNA, 35 bp, Artificial Sequence
  Synthetic oligonucleotide
ggacgggaagtccacgatgtgctgccatcattcca

SEQ ID NO: 9657 - DNA, 38 bp, Artificial Sequence
  Synthetic oligonucleotide
gggatagaacgaagacccccagtacacgcatgaaatga

SEQ ID NO: 9658 - DNA, 35 bp, Artificial Sequence
  Synthetic oligonucleotide
gtcacatgtcgtacgacggttggataggcatatat

SEQ ID NO: 9659 - DNA, 37 bp, Artificial Sequence
  Synthetic oligonucleotide
gtccggggcagtctaattggcatcaacccggaattga

SEQ ID NO: 9660 - DNA, 35 bp, Artificial Sequence
  Synthetic oligonucleotide
gtcgacgctctgtcgcacactgaaactgcttgcta

SEQ ID NO: 9661 - DNA, 35 bp, Artificial Sequence
  Synthetic oligonucleotide
gtgacacgccagtcgtacaagataacgcaccctgt

SEQ ID NO: 9662 - DNA, 37 bp, Artificial Sequence
  Synthetic oligonucleotide
gtgagcgaccgtgggcctgtagcaggtgcaatttgga

SEQ ID NO: 9663 - DNA, 37 bp, Artificial Sequence
  Synthetic oligonucleotide
gtgatccgcagatgaactaaaaacgcctcaaacggga

SEQ ID NO: 9664 - DNA, 38 bp, Artificial Sequence
  Synthetic oligonucleotide
gtgcggtgctcgtgcctagggacggcttatgcaagtga

SEQ ID NO: 9665 - DNA, 38 bp, Artificial Sequence
  Synthetic oligonucleotide
gtggtgcaccaatgggggtccatttcgaaagggcttca

SEQ ID NO: 9666 - DNA, 35 bp, Artificial Sequence
  Synthetic oligonucleotide
tacaagccggtgcagacagactcgctatatactaa

SEQ ID NO: 9667 - DNA, 38 bp, Artificial Sequence
  Synthetic oligonucleotide
tacgagcgggctgtagtgcaaattcagtcgactaatga

SEQ ID NO: 9668 - DNA, 34 bp, Artificial Sequence
  Synthetic oligonucleotide
tacgcaagcccaaaagatcgcacgtgagagcctg

SEQ ID NO: 9669 - DNA, 38 bp, Artificial Sequence
  Synthetic oligonucleotide
tacgcacaggccgagacgtgtcctaaccacttgcctga

SEQ ID NO: 9670 - DNA, 37 bp, Artificial Sequence
  Synthetic oligonucleotide
tacgccgggcgacataatggggcggttttgaacttga

SEQ ID NO: 9671 - DNA, 38 bp, Artificial Sequence
  Synthetic oligonucleotide
tacgtaggccagataaccctaacaggatgtgctcctga

SEQ ID NO: 9672 - DNA, 35 bp, Artificial Sequence
  Synthetic oligonucleotide
tcaacagggccaaccatgactgggacactgctctt

SEQ ID NO: 9673 - DNA, 36 bp, Artificial Sequence
  Synthetic oligonucleotide
tccacaaccgccagtcttagcaacgggagaccataa

SEQ ID NO: 9674 - DNA, 36 bp, Artificial Sequence
  Synthetic oligonucleotide
tccacagcagggcgtcgccttgaagaagggaacata

SEQ ID NO: 9675 - DNA, 35 bp, Artificial Sequence
  Synthetic oligonucleotide
tccacgttccatccgcgatatccggtaggaccact

SEQ ID NO: 9676 - DNA, 37 bp, Artificial Sequence
  Synthetic oligonucleotide
tccgacgcatgactggtaattaactgcacagatacga

SEQ ID NO: 9677 - DNA, 36 bp, Artificial Sequence
  Synthetic oligonucleotide
tccgccgtccgggacacgagcctcaatcccccgtta

SEQ ID NO: 9678 - DNA, 35 bp, Artificial Sequence
  Synthetic oligonucleotide
tcgcacccgcgagacgatcccaatcggactggtgc

SEQ ID NO: 9679 - DNA, 37 bp, Artificial Sequence
  Synthetic oligonucleotide
tgaatggccgaagtggtatgatgtgcaatcggagaga

SEQ ID NO: 9680 - DNA, 36 bp, Artificial Sequence
  Synthetic oligonucleotide
tgcatccgtcacgcccgttcatttactgtgttaaga

SEQ ID NO: 9681 - DNA, 37 bp, Artificial Sequence
  Synthetic oligonucleotide
tgcgcaccggagggcgacaatgggcgctcccgcttga

SEQ ID NO: 9682 - DNA, 35 bp, Artificial Sequence
  Synthetic oligonucleotide
accaacccgacgcgcactattctctggttccgctg

SEQ ID NO: 9683 - DNA, 36 bp, Artificial Sequence
  Synthetic oligonucleotide
accaacggacgtgcccaggacacaagtctctgaata

SEQ ID NO: 9684 - DNA, 35 bp, Artificial Sequence
  Synthetic oligonucleotide
accaccaacatgctaggtgtgtgtaaatctttcgc

SEQ ID NO: 9685 - DNA, 35 bp, Artificial Sequence
  Synthetic oligonucleotide
accccgccgactgaagcactccttttctactgacc

SEQ ID NO: 9686 - DNA, 35 bp, Artificial Sequence
  Synthetic oligonucleotide
acgacacggccatgctcttaaccgtaacccccaat

SEQ ID NO: 9687 - DNA, 35 bp, Artificial Sequence
  Synthetic oligonucleotide
acgcaacaccgctatgaatcgcacgcggaaccggt

SEQ ID NO: 9688 - DNA, 35 bp, Artificial Sequence
  Synthetic oligonucleotide
agtcccaacgacgctgctggtctgaaacaatatcc

SEQ ID NO: 9689 - DNA, 36 bp, Artificial Sequence
  Synthetic oligonucleotide
atacgcctccaccgcactcaccgccatatctcgata

SEQ ID NO: 9690 - DNA, 35 bp, Artificial Sequence
  Synthetic oligonucleotide
attgacccacgccgctagcattacttagccacaac

SEQ ID NO: 9691 - DNA, 38 bp, Artificial Sequence
  Synthetic oligonucleotide
gaccagccgcacaggtcatagaaatcgaggtacgttga

SEQ ID NO: 9692 - DNA, 36 bp, Artificial Sequence
  Synthetic oligonucleotide
gacccgaccaagcctgcgcatagtgacgtacaatta

SEQ ID NO: 9693 - DNA, 37 bp, Artificial Sequence
  Synthetic oligonucleotide
gacgacgggtcagtgacgcacttagttatatcgtaga

SEQ ID NO: 9694 - DNA, 36 bp, Artificial Sequence
  Synthetic oligonucleotide
gacgcaggctcccatcatacatctagacaacaccta

SEQ ID NO: 9695 - DNA, 38 bp, Artificial Sequence
  Synthetic oligonucleotide
gactgtgccggaagtgttcagtaagcccgtgtggttga

SEQ ID NO: 9696 - DNA, 35 bp, Artificial Sequence
  Synthetic oligonucleotide
gagcatgaccccagtctcctaaatcaatgcacatc

SEQ ID NO: 9697 - DNA, 35 bp, Artificial Sequence
  Synthetic oligonucleotide
gatgacgcaagttggcaaaggaagtcattcggatt

SEQ ID NO: 9698 - DNA, 37 bp, Artificial Sequence
  Synthetic oligonucleotide
gatgcccacgctctaaataactgtaggttgtttcgga

SEQ ID NO: 9699 - DNA, 38 bp, Artificial Sequence
  Synthetic oligonucleotide
gcacacatccgtgggtgagttcttccgatactatttga

SEQ ID NO: 9700 - DNA, 35 bp, Artificial Sequence
  Synthetic oligonucleotide
gccactcagccatccgattatacgctccacaccga

SEQ ID NO: 9701 - DNA, 37 bp, Artificial Sequence
  Synthetic oligonucleotide
gccatatcgctcaaagttccaagagataggtaacgga

SEQ ID NO: 9702 - DNA, 38 bp, Artificial Sequence
  Synthetic oligonucleotide
ggaccgaccccgccattgaggacgtctgaacaggctga

SEQ ID NO: 9703 - DNA, 36 bp, Artificial Sequence
  Synthetic oligonucleotide
gggaccgccaaatcagttatttctaggccacagtca

SEQ ID NO: 9704 - DNA, 38 bp, Artificial Sequence
  Synthetic oligonucleotide
gtagacacagacagcattggatcgaggggcgtagatga

SEQ ID NO: 9705 - DNA, 36 bp, Artificial Sequence
  Synthetic oligonucleotide
gtgaacgatcacggggcatacgatttccagacgata

SEQ ID NO: 9706 - DNA, 36 bp, Artificial Sequence
  Synthetic oligonucleotide
gtgagctccgtcacccgaacatagaactagcacgaa

SEQ ID NO: 9707 - DNA, 38 bp, Artificial Sequence
  Synthetic oligonucleotide
gtgcacagtcggtatcgtgaagacacggtccaagctga

SEQ ID NO: 9708 - DNA, 37 bp, Artificial Sequence
  Synthetic oligonucleotide
gttgcgggcatacgcgtaaagacacatcttggtagga

SEQ ID NO: 9709 - DNA, 36 bp, Artificial Sequence
  Synthetic oligonucleotide
tacatcgcaggtgaacgcgccgtgtcaagcatccta

SEQ ID NO: 9710 - DNA, 37 bp, Artificial Sequence
  Synthetic oligonucleotide
tatcgcatcgggctccattccaaagtgactagccgga

SEQ ID NO: 9711 - DNA, 35 bp, Artificial Sequence
  Synthetic oligonucleotide
tcatcttgccggacccagtaagataaggtcacttg

SEQ ID NO: 9712 - DNA, 35 bp, Artificial Sequence
  Synthetic oligonucleotide
tccacccgtgcgttgttcaaactccgccccacctg

SEQ ID NO: 9713 - DNA, 35 bp, Artificial Sequence
  Synthetic oligonucleotide
tgactcgcaacacatcgctatcccacacactactt

SEQ ID NO: 9714 - DNA, 35 bp, Artificial Sequence
  Synthetic oligonucleotide
tgatacccctctcgtcccaacgccatacacgactg

SEQ ID NO: 9715 - DNA, 35 bp, Artificial Sequence
  Synthetic oligonucleotide
acaccacgtcctaagccaaggtcgtagacggtacc

SEQ ID NO: 9716 - DNA, 35 bp, Artificial Sequence
  Synthetic oligonucleotide
acatgcggatgtccctaagctctatgggattaccg

SEQ ID NO: 9717 - DNA, 35 bp, Artificial Sequence
  Synthetic oligonucleotide
acatggccgagaccgattaacgtgctgtttccata

SEQ ID NO: 9718 - DNA, 38 bp, Artificial Sequence
  Synthetic oligonucleotide
accacacgggaagtagggtgtagcacattctggcttga

SEQ ID NO: 9719 - DNA, 37 bp, Artificial Sequence
  Synthetic oligonucleotide
accgcgcaggtacgcgttcgtgtttgaataggtcaga

SEQ ID NO: 9720 - DNA, 37 bp, Artificial Sequence
  Synthetic oligonucleotide
atgcaacaggagtagataataggccttccaatcgtga

SEQ ID NO: 9721 - DNA, 38 bp, Artificial Sequence
  Synthetic oligonucleotide
atggtccggtaggcgaatgtgacaggatgcgtctttga

SEQ ID NO: 9722 - DNA, 38 bp, Artificial Sequence
  Synthetic oligonucleotide
cacgccaagacaatgctggggtgacgtaattgttttga

SEQ ID NO: 9723 - DNA, 38 bp, Artificial Sequence
  Synthetic oligonucleotide
cgcacgctaaatgtggtcacgctgaagttcatcactga

SEQ ID NO: 9724 - DNA, 36 bp, Artificial Sequence
  Synthetic oligonucleotide
cgtgggcaacgagacgtcaaattcacgcgcatcgaa

SEQ ID NO: 9725 - DNA, 38 bp, Artificial Sequence
  Synthetic oligonucleotide
gaaatgcacagcgcaaccgttgccacagccaggcgtga

SEQ ID NO: 9726 - DNA, 37 bp, Artificial Sequence
  Synthetic oligonucleotide
gaccaccgcaccgtgcgtacaatgaatcgccgttaga

SEQ ID NO: 9727 - DNA, 38 bp, Artificial Sequence
  Synthetic oligonucleotide
gacgaacgcaaatagtgcataatgtacgttgcatatga

SEQ ID NO: 9728 - DNA, 38 bp, Artificial Sequence
  Synthetic oligonucleotide
gacgaggccgatcgtgaacgaggagcgaggcttcatga

SEQ ID NO: 9729 - DNA, 35 bp, Artificial Sequence
  Synthetic oligonucleotide
gacgccccattaacgtctccggtgtcagcccatgc

SEQ ID NO: 9730 - DNA, 35 bp, Artificial Sequence
  Synthetic oligonucleotide
gagacacgagagcacaagtgggaagcctagcctgg

SEQ ID NO: 9731 - DNA, 38 bp, Artificial Sequence
  Synthetic oligonucleotide
gagacgccggggggaagaggagacgaatagacggctga

SEQ ID NO: 9732 - DNA, 36 bp, Artificial Sequence
  Synthetic oligonucleotide
gagtccgcaccccagtgcttcgcgacttgtgtttta

SEQ ID NO: 9733 - DNA, 37 bp, Artificial Sequence
  Synthetic oligonucleotide
gatgacgtcacctcacagcgatgacagccatgccaga

SEQ ID NO: 9734 - DNA, 35 bp, Artificial Sequence
  Synthetic oligonucleotide
gatgcacgcctaagttcggttctttgacgtacgta

SEQ ID NO: 9735 - DNA, 37 bp, Artificial Sequence
  Synthetic oligonucleotide
gatgccacaagtccgtatgaaggaacagctgacccga

SEQ ID NO: 9736 - DNA, 36 bp, Artificial Sequence
  Synthetic oligonucleotide
gcacacgccgaagaggtacctgtagcgtgccaccca

SEQ ID NO: 9737 - DNA, 35 bp, Artificial Sequence
  Synthetic oligonucleotide
gcacacgtcgagtgcaacatccatccttttcatct

SEQ ID NO: 9738 - DNA, 36 bp, Artificial Sequence
  Synthetic oligonucleotide
gcaccctgcatccatgcccaccttgttcttcttaca

SEQ ID NO: 9739 - DNA, 37 bp, Artificial Sequence
  Synthetic oligonucleotide
gcaccgggccatacacagacgttatcagtccggtaga

SEQ ID NO: 9740 - DNA, 37 bp, Artificial Sequence
  Synthetic oligonucleotide
gcacgaaccccaactactgaccccgcctcgaaccggg

SEQ ID NO: 9741 - DNA, 35 bp, Artificial Sequence
  Synthetic oligonucleotide
gcaggggggccacgagcgacatgtacgttatctag

SEQ ID NO: 9742 - DNA, 36 bp, Artificial Sequence
  Synthetic oligonucleotide
gccgatgcctagtgggagtgcagtgctggcgttaaa

SEQ ID NO: 9743 - DNA, 35 bp, Artificial Sequence
  Synthetic oligonucleotide
gcctacctacccgaggatgtgaggccttattcgag

SEQ ID NO: 9744 - DNA, 38 bp, Artificial Sequence
  Synthetic oligonucleotide
gcgacgtgaggcgcatgttgtgcccagggtgagcctga

SEQ ID NO: 9745 - DNA, 37 bp, Artificial Sequence
  Synthetic oligonucleotide
gcgcacaccacggtaaggcaacgtaacaaggtattga

SEQ ID NO: 9746 - DNA, 36 bp, Artificial Sequence
  Synthetic oligonucleotide
gctcaacaacagacgtcggtgcacggatttcaggga

SEQ ID NO: 9747 - DNA, 35 bp, Artificial Sequence
  Synthetic oligonucleotide
ggacacgtagtgcactcgtgccaactcacgattgc

SEQ ID NO: 9748 - DNA, 38 bp, Artificial Sequence
  Synthetic oligonucleotide
gtgactgcagagctcagctgggattccttatgcaatga

SEQ ID NO: 9749 - DNA, 36 bp, Artificial Sequence
  Synthetic oligonucleotide
gtggagtcgcacacgtatctgttgcatgacgaacat

SEQ ID NO: 9750 - DNA, 38 bp, Artificial Sequence
  Synthetic oligonucleotide
tcagggaggaggcactgctctggagatgacacgtatga

SEQ ID NO: 9751 - DNA, 38 bp, Artificial Sequence
  Synthetic oligonucleotide
tccaacgggctgtcaccgtcatagtcgaggacgactga

SEQ ID NO: 9752 - DNA, 36 bp, Artificial Sequence
  Synthetic oligonucleotide
tccagccaagctgaagataaactaccgagtatgcta

SEQ ID NO: 9753 - DNA, 38 bp, Artificial Sequence
  Synthetic oligonucleotide
tgaggaccgccagaaatcgacgagttcatatactctga

SEQ ID NO: 9754 - DNA, 35 bp, Artificial Sequence
  Synthetic oligonucleotide
tgatgcctagctcgagaaaatcggaaatagcgttt

SEQ ID NO: 9755 - DNA, 36 bp, Artificial Sequence
  Synthetic oligonucleotide
aacacgacaggcaggtctacactattagtttttcta

SEQ ID NO: 9756 - DNA, 35 bp, Artificial Sequence
  Synthetic oligonucleotide
aacgacggtgcgaggagaactctggccttggggta

SEQ ID NO: 9757 - DNA, 36 bp, Artificial Sequence
  Synthetic oligonucleotide
acaccactgggccagagttgcgttaatgttagcgga

SEQ ID NO: 9758 - DNA, 36 bp, Artificial Sequence
  Synthetic oligonucleotide
accacggggagtataacctgaaggcgcaaataggga

SEQ ID NO: 9759 - DNA, 36 bp, Artificial Sequence
  Synthetic oligonucleotide
acccacacatacctcgggacgtatcgggccacataa

SEQ ID NO: 9760 - DNA, 36 bp, Artificial Sequence
  Synthetic oligonucleotide
accgcaatgcacggattaaaagcaacctatttaaga

SEQ ID NO: 9761 - DNA, 35 bp, Artificial Sequence
  Synthetic oligonucleotide
accgcgacgtacagcatgcataaatcatcgcgtta

SEQ ID NO: 9762 - DNA, 36 bp, Artificial Sequence
  Synthetic oligonucleotide
atcaccccaagtggcgtcaacgcacggcaagaggaa

SEQ ID NO: 9763 - DNA, 37 bp, Artificial Sequence
  Synthetic oligonucleotide
atccaatcgccggctcgtacaatcacagattcctgga

SEQ ID NO: 9764 - DNA, 38 bp, Artificial Sequence
  Synthetic oligonucleotide
ccggaacggacggggtacgggaactgttgagttgttga

SEQ ID NO: 9765 - DNA, 35 bp, Artificial Sequence
  Synthetic oligonucleotide
gacaacgaagacgacgtacgagagcgcgggcgtcc

SEQ ID NO: 9766 - DNA, 37 bp, Artificial Sequence
  Synthetic oligonucleotide
gacacgaaacgcgatatagaccagttgcaacacacga

SEQ ID NO: 9767 - DNA, 35 bp, Artificial Sequence
  Synthetic oligonucleotide
gacacgccggacgataccgcacgatgcaagtctat

SEQ ID NO: 9768 - DNA, 38 bp, Artificial Sequence
  Synthetic oligonucleotide
gaccacgtacggtggctattatcagtgcgttctgttga

SEQ ID NO: 9769 - DNA, 37 bp, Artificial Sequence
  Synthetic oligonucleotide
gacgcagtcggtccctacagtgttttggaggctcgga

SEQ ID NO: 9770 - DNA, 36 bp, Artificial Sequence
  Synthetic oligonucleotide
gacgccggctagtgtaccttacatgtcgcaagcaga

SEQ ID NO: 9771 - DNA, 35 bp, Artificial Sequence
  Synthetic oligonucleotide
gagacaagcgccaatcgtccaccagtcacccctcc

SEQ ID NO: 9772 - DNA, 36 bp, Artificial Sequence
  Synthetic oligonucleotide
gaggacacccgtgcacagtcttcaaccgtcgacgta

SEQ ID NO: 9773 - DNA, 35 bp, Artificial Sequence
  Synthetic oligonucleotide
gaggggcgacgctcacgtcatgactcaactacgat

SEQ ID NO: 9774 - DNA, 36 bp, Artificial Sequence
  Synthetic oligonucleotide
gatgcgcgcgaccacttacccaaactcctcgaggaa

SEQ ID NO: 9775 - DNA, 35 bp, Artificial Sequence
  Synthetic oligonucleotide
gcaacccaaagcccacgtcgacgacaatccgtcca

SEQ ID NO: 9776 - DNA, 37 bp, Artificial Sequence
  Synthetic oligonucleotide
gcaccaatcgcccacctacagtgctcgcatgtcggga

SEQ ID NO: 9777 - DNA, 36 bp, Artificial Sequence
  Synthetic oligonucleotide
gcacgccatagtccaaacggtctgagggtttaatga

SEQ ID NO: 9778 - DNA, 37 bp, Artificial Sequence
  Synthetic oligonucleotide
gcagggcacgcaattatcccaagtcgtacttcaccga

SEQ ID NO: 9779 - DNA, 37 bp, Artificial Sequence
  Synthetic oligonucleotide
gcagtcaggaggctagctaatcagacagcaccttaga

SEQ ID NO: 9780 - DNA, 35 bp, Artificial Sequence
  Synthetic oligonucleotide
gcgcgtgagcgcaagagcaaagagatacgtcatgg

SEQ ID NO: 9781 - DNA, 36 bp, Artificial Sequence
  Synthetic oligonucleotide
gtcccgaccccggcatgagatccatcgcgacctgca

SEQ ID NO: 9782 - DNA, 35 bp, Artificial Sequence
  Synthetic oligonucleotide
gtgccccccaggatatgccagcttacgatagccca

SEQ ID NO: 9783 - DNA, 36 bp, Artificial Sequence
  Synthetic oligonucleotide
gtgcgcagtgaaagagtgccgcggaactgccttgta

SEQ ID NO: 9784 - DNA, 37 bp, Artificial Sequence
  Synthetic oligonucleotide
gttgcaccgacgaacgtaagaatttcaacgcacggga

SEQ ID NO: 9785 - DNA, 37 bp, Artificial Sequence
  Synthetic oligonucleotide
taaccacaccgcacctcgcgccacgacaaccaacgga

SEQ ID NO: 9786 - DNA, 35 bp, Artificial Sequence
  Synthetic oligonucleotide
tcactgcgacctcatggatgtatcttgccactgtg

SEQ ID NO: 9787 - DNA, 37 bp, Artificial Sequence
  Synthetic oligonucleotide
tcatccgcagaccacttacccgacgcccacggttgga

SEQ ID NO: 9788 - DNA, 36 bp, Artificial Sequence
  Synthetic oligonucleotide
tcccgcgttgaatttgttcgctttggtaagccgaga

SEQ ID NO: 9789 - DNA, 35 bp, Artificial Sequence
  Synthetic oligonucleotide
tgaacacccggcggaaagcgatgctgactcaatgg

SEQ ID NO: 9790 - DNA, 38 bp, Artificial Sequence
  Synthetic oligonucleotide
tgcgccatcagaggtgacttatggtcgaaggactctga

SEQ ID NO: 9791 - DNA, 38 bp, Artificial Sequence
  Synthetic oligonucleotide
tgtcatgccacgatgacggtcaaatcttgtgttcttga

SEQ ID NO: 9792 - DNA, 35 bp, Artificial Sequence
  Synthetic oligonucleotide
aacccgccaacaaacgtcccattcccaagcgtgcc

SEQ ID NO: 9793 - DNA, 36 bp, Artificial Sequence
  Synthetic oligonucleotide
acaccaccgctgcactttactgaagaccactatgca

SEQ ID NO: 9794 - DNA, 33 bp, Artificial Sequence
  Synthetic oligonucleotide
acaccacgacacatgagtagccacgcacaatgt

SEQ ID NO: 9795 - DNA, 35 bp, Artificial Sequence
  Synthetic oligonucleotide
accacacaggtagatggtcccttatcacgcaatca

SEQ ID NO: 9796 - DNA, 35 bp, Artificial Sequence
  Synthetic oligonucleotide
acctgccggggtagttcgcttagagaccgcttagc

SEQ ID NO: 9797 - DNA, 37 bp, Artificial Sequence
  Synthetic oligonucleotide
agaccgagcccaaagtacagcagtccctcgtgtaaga

SEQ ID NO: 9798 - DNA, 37 bp, Artificial Sequence
  Synthetic oligonucleotide
agaccgcgcaaagagcttcgtgacaggttatatgcga

SEQ ID NO: 9799 - DNA, 35 bp, Artificial Sequence
  Synthetic oligonucleotide
atcccgccacaccgcctctatcgtcgtgatggaca

SEQ ID NO: 9800 - DNA, 37 bp, Artificial Sequence
  Synthetic oligonucleotide
atcgccgacaaggagtacaaactgtcgcgtccatcga

SEQ ID NO: 9801 - DNA, 35 bp, Artificial Sequence
  Synthetic oligonucleotide
gaagtccaggaacgccacggttatcattagtcctt

SEQ ID NO: 9802 - DNA, 38 bp, Artificial Sequence
  Synthetic oligonucleotide
gacaacccagaccatcgtgagtcaaacggctgtcctga

SEQ ID NO: 9803 - DNA, 36 bp, Artificial Sequence
  Synthetic oligonucleotide
gaccaaccagccggtggcgatctgtcttcctttcaa

SEQ ID NO: 9804 - DNA, 37 bp, Artificial Sequence
  Synthetic oligonucleotide
gacgcatctcaagtacggacatggaggctctcccaga

SEQ ID NO: 9805 - DNA, 38 bp, Artificial Sequence
  Synthetic oligonucleotide
gagacatcccaatggctcacaggcacatgtcacagtga

SEQ ID NO: 9806 - DNA, 37 bp, Artificial Sequence
  Synthetic oligonucleotide
gcaccgctcgaaacacgaccgagggagtcttaaacga

SEQ ID NO: 9807 - DNA, 36 bp, Artificial Sequence
  Synthetic oligonucleotide
gccgagccacgtagcttaaatttcgcctgttacgga

SEQ ID NO: 9808 - DNA, 38 bp, Artificial Sequence
  Synthetic oligonucleotide
gctcacgccggtaccacaccaactctctttttcattga

SEQ ID NO: 9809 - DNA, 35 bp, Artificial Sequence
  Synthetic oligonucleotide
gctcgccttagcacatcccgttaagtagggggtcg

SEQ ID NO: 9810 - DNA, 35 bp, Artificial Sequence
  Synthetic oligonucleotide
gctgcctccgaaataattgggacgctattcgtaag

SEQ ID NO: 9811 - DNA, 34 bp, Artificial Sequence
  Synthetic oligonucleotide
gtaccgtacaacatcccaatgtgtagtcggtata

SEQ ID NO: 9812 - DNA, 38 bp, Artificial Sequence
  Synthetic oligonucleotide
gtcaccacggcgggtggtttaagtgggacactgactga

SEQ ID NO: 9813 - DNA, 36 bp, Artificial Sequence
  Synthetic oligonucleotide
gtgagcggccacactttaacacatgcaaacccttca

SEQ ID NO: 9814 - DNA, 37 bp, Artificial Sequence
  Synthetic oligonucleotide
tacccgcgcacgctcgctcgaggaggaccactcctga

SEQ ID NO: 9815 - DNA, 35 bp, Artificial Sequence
  Synthetic oligonucleotide
tcacacaggcaccgataccgacaatcccacgaagc

SEQ ID NO: 9816 - DNA, 34 bp, Artificial Sequence
  Synthetic oligonucleotide
tcacccgccggcgcaatccaccaactttacatcg

SEQ ID NO: 9817 - DNA, 37 bp, Artificial Sequence
  Synthetic oligonucleotide
tccaacacaaggttcatagagagcgcgtggccgaaga

SEQ ID NO: 9818 - DNA, 38 bp, Artificial Sequence
  Synthetic oligonucleotide
tcgacccacagctggggcggcacatcatgtaagcatga

SEQ ID NO: 9819 - DNA, 37 bp, Artificial Sequence
  Synthetic oligonucleotide
tgcaatgccgaacgttcaagtgacgtcttgagaaaga

SEQ ID NO: 9820 - DNA, 38 bp, Artificial Sequence
  Synthetic oligonucleotide
tgccacctaacacggtgagatgcagggggtggtcctga

SEQ ID NO: 9821 - DNA, 35 bp, Artificial Sequence
  Synthetic oligonucleotide
tgctaccacacagaccccgaccttatccgaataat

SEQ ID NO: 9822 - DNA, 36 bp, Artificial Sequence
  Synthetic oligonucleotide
acagaagctgccaacaacactcccattcccattgta

SEQ ID NO: 9823 - DNA, 38 bp, Artificial Sequence
  Synthetic oligonucleotide
accaacgcaggtgtacgtcgaagaaatgtccgctttga

SEQ ID NO: 9824 - DNA, 36 bp, Artificial Sequence
  Synthetic oligonucleotide
accaccaccccgtagccctaccaccccgtccgcaga

SEQ ID NO: 9825 - DNA, 38 bp, Artificial Sequence
  Synthetic oligonucleotide
accaccccgcgatcacgctgatgttctgggacctctga

SEQ ID NO: 9826 - DNA, 38 bp, Artificial Sequence
  Synthetic oligonucleotide
accgtacgcgtgccttaagagctgtacccttcagctga

SEQ ID NO: 9827 - DNA, 36 bp, Artificial Sequence
  Synthetic oligonucleotide
acctgggccagggaccgaatgctgagaatcgtgcga

SEQ ID NO: 9828 - DNA, 36 bp, Artificial Sequence
  Synthetic oligonucleotide
agcacccggcgcatgacttggttatgctgatcacaa

SEQ ID NO: 9829 - DNA, 36 bp, Artificial Sequence
  Synthetic oligonucleotide
atcacgagcatggaacgagcacatggagatacgcta

SEQ ID NO: 9830 - DNA, 36 bp, Artificial Sequence
  Synthetic oligonucleotide
atgtgccagtctaagccagccgccattgtccttcca

SEQ ID NO: 9831 - DNA, 37 bp, Artificial Sequence
  Synthetic oligonucleotide
catgcggagaacaccacgtctgcaagatgcacattga

SEQ ID NO: 9832 - DNA, 38 bp, Artificial Sequence
  Synthetic oligonucleotide
gaaacgcgcgggtatggcgattgggatgatttaggtga

SEQ ID NO: 9833 - DNA, 37 bp, Artificial Sequence
  Synthetic oligonucleotide
gaatggaacgccactcactcgacggcataatccgaga

SEQ ID NO: 9834 - DNA, 36 bp, Artificial Sequence
  Synthetic oligonucleotide
gacacaactgcgcagctgactcaaccggatactaaa

SEQ ID NO: 9835 - DNA, 35 bp, Artificial Sequence
  Synthetic oligonucleotide
gacacctgcaacagtgcaatgctaaccactccatc

SEQ ID NO: 9836 - DNA, 38 bp, Artificial Sequence
  Synthetic oligonucleotide
gacacgccgagaggagtttgacgattcaggaccattga

SEQ ID NO: 9837 - DNA, 37 bp, Artificial Sequence
  Synthetic oligonucleotide
gacgcaaggcatggtaacgtgatgagggccgtataga

SEQ ID NO: 9838 - DNA, 37 bp, Artificial Sequence
  Synthetic oligonucleotide
gacgcgtaatgcagtcgaggacaactggccttgagga

SEQ ID NO: 9839 - DNA, 37 bp, Artificial Sequence
  Synthetic oligonucleotide
gacggaggagcgtcttggtataaattcacatggtcga

SEQ ID NO: 9840 - DNA, 35 bp, Artificial Sequence
  Synthetic oligonucleotide
gacggaggccacaggaaatgtatgtcagccataag

SEQ ID NO: 9841 - DNA, 35 bp, Artificial Sequence
  Synthetic oligonucleotide
gagccacgtaaactttagtcgtacgtcacgcttga

SEQ ID NO: 9842 - DNA, 37 bp, Artificial Sequence
  Synthetic oligonucleotide
gagcgtgccaaagttctttccacatatcgatccccga

SEQ ID NO: 9843 - DNA, 35 bp, Artificial Sequence
  Synthetic oligonucleotide
gcactgtgcaggcttattcccaaagaagcgcattg

SEQ ID NO: 9844 - DNA, 37 bp, Artificial Sequence
  Synthetic oligonucleotide
gcatcgcacgttagctagtacgcaacttatcgcttga

SEQ ID NO: 9845 - DNA, 35 bp, Artificial Sequence
  Synthetic oligonucleotide
gcgaggagcaacggaggtctatggcgttcctaccg

SEQ ID NO: 9846 - DNA, 38 bp, Artificial Sequence
  Synthetic oligonucleotide
ggacacctcgagtcatgtgggacagagctaatgcgtga

SEQ ID NO: 9847 - DNA, 35 bp, Artificial Sequence
  Synthetic oligonucleotide
ggtgaagcatcagcacttcctcctcattgccaacc

SEQ ID NO: 9848 - DNA, 37 bp, Artificial Sequence
  Synthetic oligonucleotide
ggtgccgaaccccacgaacgatcaggcgctactcgta

SEQ ID NO: 9849 - DNA, 35 bp, Artificial Sequence
  Synthetic oligonucleotide
gtccacggcctgtgtgagacgcatacgtaaccctc

SEQ ID NO: 9850 - DNA, 37 bp, Artificial Sequence
  Synthetic oligonucleotide
gttgtgccgatgccaggagtcacaaagtccttgtaga

SEQ ID NO: 9851 - DNA, 35 bp, Artificial Sequence
  Synthetic oligonucleotide
tacaaccccggtccacaagtgttgcaggacagaca

SEQ ID NO: 9852 - DNA, 37 bp, Artificial Sequence
  Synthetic oligonucleotide
tagcaacaacagtcagttttgctgatcaagttggaga

SEQ ID NO: 9853 - DNA, 35 bp, Artificial Sequence
  Synthetic oligonucleotide
tatgccgcaccacatcgcgttaggatcggtcagga

SEQ ID NO: 9854 - DNA, 35 bp, Artificial Sequence
  Synthetic oligonucleotide
tcaccacgcacagttgtaaaatcagtcctgttccg

SEQ ID NO: 9855 - DNA, 35 bp, Artificial Sequence
  Synthetic oligonucleotide
tcacgcaacccgtcgccgtgcaaagaaaaacctga

SEQ ID NO: 9856 - DNA, 37 bp, Artificial Sequence
  Synthetic oligonucleotide
tctgtgcacccgcgacttgatatcacctaacgtacga

SEQ ID NO: 9857 - DNA, 36 bp, Artificial Sequence
  Synthetic oligonucleotide
tgacacgcgctggacctcatcgtccgtttaggagca

SEQ ID NO: 9858 - DNA, 38 bp, Artificial Sequence
  Synthetic oligonucleotide
tgacgcatcagtctatataacagcggaatacctggtga

SEQ ID NO: 9859 - DNA, 37 bp, Artificial Sequence
  Synthetic oligonucleotide
aacccatcgcgcccgagtaggtaggtacggattcaga

SEQ ID NO: 9860 - DNA, 36 bp, Artificial Sequence
  Synthetic oligonucleotide
aacgacaggtggttgacgtatcaggcgcagagtcca

SEQ ID NO: 9861 - DNA, 37 bp, Artificial Sequence
  Synthetic oligonucleotide
aacgatgacgccatcaatggtacaggtatcgtgggga

SEQ ID NO: 9862 - DNA, 37 bp, Artificial Sequence
  Synthetic oligonucleotide
aacgcgacagaagcgtgtagttcgtgagatgggtaga

SEQ ID NO: 9863 - DNA, 35 bp, Artificial Sequence
  Synthetic oligonucleotide
aatgcaagcaggtgggtagtggagttcgaagggtc

SEQ ID NO: 9864 - DNA, 37 bp, Artificial Sequence
  Synthetic oligonucleotide
acacctgccggaggttcatcttttacgtcgtatgaga

SEQ ID NO: 9865 - DNA, 38 bp, Artificial Sequence
  Synthetic oligonucleotide
acatgccctcgcggacacgatttaagttatggaaatga

SEQ ID NO: 9866 - DNA, 37 bp, Artificial Sequence
  Synthetic oligonucleotide
acccacacacgcccatgcggtagttagttgccgttga

SEQ ID NO: 9867 - DNA, 35 bp, Artificial Sequence
  Synthetic oligonucleotide
atcaccgtggcttagtgtcgaatgaaccccttgag

SEQ ID NO: 9868 - DNA, 36 bp, Artificial Sequence
  Synthetic oligonucleotide
gaaccggtcgggaaggtctagttcgttgacttacga

SEQ ID NO: 9869 - DNA, 35 bp, Artificial Sequence
  Synthetic oligonucleotide
gacacaggtgctgatgaagcggtcgatcacgcggt

SEQ ID NO: 9870 - DNA, 38 bp, Artificial Sequence
  Synthetic oligonucleotide
gacacgagacccatgtggaaaaaagtcaagaagtttga

SEQ ID NO: 9871 - DNA, 36 bp, Artificial Sequence
  Synthetic oligonucleotide
gacagggtggtggggtgagcacatcttgcgataata

SEQ ID NO: 9872 - DNA, 35 bp, Artificial Sequence
  Synthetic oligonucleotide
gacatcacgactgtacgtacgaggactgcgtgaat

SEQ ID NO: 9873 - DNA, 36 bp, Artificial Sequence
  Synthetic oligonucleotide
gacggggtgggggggagtggcataaaggtaggtgca

SEQ ID NO: 9874 - DNA, 36 bp, Artificial Sequence
  Synthetic oligonucleotide
gagacgacactggagtctgaggtaccggtactttca

SEQ ID NO: 9875 - DNA, 38 bp, Artificial Sequence
  Synthetic oligonucleotide
gcacacaacgccccatccgtcaagttctactgaactga

SEQ ID NO: 9876 - DNA, 37 bp, Artificial Sequence
  Synthetic oligonucleotide
gcacacagcagggatgtttatatgggcacgttcgaga

SEQ ID NO: 9877 - DNA, 35 bp, Artificial Sequence
  Synthetic oligonucleotide
gccacacagtgtgggaagaccgatcgcatccaata

SEQ ID NO: 9878 - DNA, 36 bp, Artificial Sequence
  Synthetic oligonucleotide
gccacgccaaacatccaggcactcagtgcttgctca

SEQ ID NO: 9879 - DNA, 36 bp, Artificial Sequence
  Synthetic oligonucleotide
gcccaccacccgtcttcattcctactctccgttgta

SEQ ID NO: 9880 - DNA, 38 bp, Artificial Sequence
  Synthetic oligonucleotide
gctgtcgaagtcggtcaaggtcccatcgccgtcgttga

SEQ ID NO: 9881 - DNA, 38 bp, Artificial Sequence
  Synthetic oligonucleotide
gtgacggacttgccgttcatgttaaaggagagcgatga

SEQ ID NO: 9882 - DNA, 35 bp, Artificial Sequence
  Synthetic oligonucleotide
tacgtgcgcatcaggtgtgtgtaatattagacctt

SEQ ID NO: 9883 - DNA, 35 bp, Artificial Sequence
  Synthetic oligonucleotide
tcgagtcacgcgccaaaaaagatatgacgaaacta

SEQ ID NO: 9884 - DNA, 37 bp, Artificial Sequence
  Synthetic oligonucleotide
tgacatacgaccgggtgtgcaacctccaacgatctga

SEQ ID NO: 9885 - DNA, 38 bp, Artificial Sequence
  Synthetic oligonucleotide
tgaggccggaaggtgagagatcgaatagggtaacgtga

SEQ ID NO: 9886 - DNA, 38 bp, Artificial Sequence
  Synthetic oligonucleotide
tgcgacgggcctttgaaagtacgcagtttccgatctga

SEQ ID NO: 9887 - DNA, 36 bp, Artificial Sequence
  Synthetic oligonucleotide
tgcgcacggtacttgagaaaggcaggtgcgactgta

SEQ ID NO: 9888 - DNA, 36 bp, Artificial Sequence
  Synthetic oligonucleotide
tgtgaaccacacactactcaaaacagacatggaaaa

SEQ ID NO: 9889 - DNA, 38 bp, Artificial Sequence
  Synthetic oligonucleotide
aacaccgccaccctaccagttcgaagtcagtgcgctga

SEQ ID NO: 9890 - DNA, 35 bp, Artificial Sequence
  Synthetic oligonucleotide
aacgcgggcgggagtaggaacgacgaatttccgat

SEQ ID NO: 9891 - DNA, 37 bp, Artificial Sequence
  Synthetic oligonucleotide
aactgccgagcgggtcagggctagaacaaaaaaggga

SEQ ID NO: 9892 - DNA, 37 bp, Artificial Sequence
  Synthetic oligonucleotide
aagcaacgcacagttgagcatcccgctctgccttgga

SEQ ID NO: 9893 - DNA, 35 bp, Artificial Sequence
  Synthetic oligonucleotide
acaccggggtgtcaactgcgatccttattgttttc

SEQ ID NO: 9894 - DNA, 35 bp, Artificial Sequence
  Synthetic oligonucleotide
accaaccgaaggtgtataccaatcgtccccttatg

SEQ ID NO: 9895 - DNA, 35 bp, Artificial Sequence
  Synthetic oligonucleotide
accgacgggcgtgtgtgggtacttcggtacaggat

SEQ ID NO: 9896 - DNA, 35 bp, Artificial Sequence
  Synthetic oligonucleotide
accgcagggggacggactgccgtttttttttcgtc

SEQ ID NO: 9897 - DNA, 37 bp, Artificial Sequence
  Synthetic oligonucleotide
accgcatgtgtagcacactgtgtaaaacgagttgtga

SEQ ID NO: 9898 - DNA, 35 bp, Artificial Sequence
  Synthetic oligonucleotide
accgtgagggagccaaatgcataggtaacgttgta

SEQ ID NO: 9899 - DNA, 35 bp, Artificial Sequence
  Synthetic oligonucleotide
acgatccaagctgacggtactaaagaagtgcatcg

SEQ ID NO: 9900 - DNA, 38 bp, Artificial Sequence
  Synthetic oligonucleotide
atcatgcaggtcatgaaccgatgtgcctaatcctttga

SEQ ID NO: 9901 - DNA, 36 bp, Artificial Sequence
  Synthetic oligonucleotide
atgcgccctcacagcaacgccccttcgatacaggaa

SEQ ID NO: 9902 - DNA, 35 bp, Artificial Sequence
  Synthetic oligonucleotide
atggtcgcaccacactcgtagcactaaacttctcg

SEQ ID NO: 9903 - DNA, 35 bp, Artificial Sequence
  Synthetic oligonucleotide
gacacggtgaaggattgttacggccgcacggattg

SEQ ID NO: 9904 - DNA, 38 bp, Artificial Sequence
  Synthetic oligonucleotide
gaccgagccggaagaagtggtaaattgagtgtgactga

SEQ ID NO: 9905 - DNA, 36 bp, Artificial Sequence
  Synthetic oligonucleotide
gacgaagtacgtgtctgaggctgtcggtgctttaca

SEQ ID NO: 9906 - DNA, 37 bp, Artificial Sequence
  Synthetic oligonucleotide
gacgagcactcaaaggtaagcgactgcctttgaagga

SEQ ID NO: 9907 - DNA, 38 bp, Artificial Sequence
  Synthetic oligonucleotide
gacggggtccgaacggatacacgaacggtgctgcttga

SEQ ID NO: 9908 - DNA, 35 bp, Artificial Sequence
  Synthetic oligonucleotide
gactgaggaggtagagggaatagaaaaggaaagtg

SEQ ID NO: 9909 - DNA, 36 bp, Artificial Sequence
  Synthetic oligonucleotide
gagcaacacaacccctggagtggaatattgcgaata

SEQ ID NO: 9910 - DNA, 35 bp, Artificial Sequence
  Synthetic oligonucleotide
gatgagccaaccccgtctcgtcgctgttaccctgt

SEQ ID NO: 9911 - DNA, 37 bp, Artificial Sequence
  Synthetic oligonucleotide
gatgcccgtgggtctcgagaatagtccggactggaga

SEQ ID NO: 9912 - DNA, 37 bp, Artificial Sequence
  Synthetic oligonucleotide
gatgcctaagcgatgtgtgcgcttctccgacgttgga

SEQ ID NO: 9913 - DNA, 36 bp, Artificial Sequence
  Synthetic oligonucleotide
gatggacgtgagcgtgaagcgattgtcgtctgagga

SEQ ID NO: 9914 - DNA, 33 bp, Artificial Sequence
  Synthetic oligonucleotide
gcaacccgcgaatctaaaaggccagtcagtgcg

SEQ ID NO: 9915 - DNA, 35 bp, Artificial Sequence
  Synthetic oligonucleotide
gcatgccacactagtctaatgcgttgagcgtcttg

SEQ ID NO: 9916 - DNA, 35 bp, Artificial Sequence
  Synthetic oligonucleotide
gccaagcactggttctacttaagcaagacgagtgc

SEQ ID NO: 9917 - DNA, 37 bp, Artificial Sequence
  Synthetic oligonucleotide
gccactcagaggttaagacgggtttgaaaagatacga

SEQ ID NO: 9918 - DNA, 38 bp, Artificial Sequence
  Synthetic oligonucleotide
gccactccatctctgactgcattcccaaatgcatgtga

SEQ ID NO: 9919 - DNA, 36 bp, Artificial Sequence
  Synthetic oligonucleotide
gccgactggcgaccactcttgtaaccactttcctca

SEQ ID NO: 9920 - DNA, 38 bp, Artificial Sequence
  Synthetic oligonucleotide
gtcgatgcgcgaagtgtctgctggcattgctaaattga

SEQ ID NO: 9921 - DNA, 35 bp, Artificial Sequence
  Synthetic oligonucleotide
gtggtcgcacgaaacaaggggcccatatactgcac

SEQ ID NO: 9922 - DNA, 35 bp, Artificial Sequence
  Synthetic oligonucleotide
tcaatgccaagcacacaccattgcactgtgcgatc

SEQ ID NO: 9923 - DNA, 35 bp, Artificial Sequence
  Synthetic oligonucleotide
tcacgcacatgtcatacgacgctaggtcttgcacg

SEQ ID NO: 9924 - DNA, 36 bp, Artificial Sequence
  Synthetic oligonucleotide
tcagccaccccgctctgacgccccactgctaggcca

SEQ ID NO: 9925 - DNA, 37 bp, Artificial Sequence
  Synthetic oligonucleotide
tccaacgggcagggcgtccagaaacgtcagaagatga

SEQ ID NO: 9926 - DNA, 36 bp, Artificial Sequence
  Synthetic oligonucleotide
tgacaccgaacgtgcaaagccatcattgctactcta

SEQ ID NO: 9927 - DNA, 35 bp, Artificial Sequence
  Synthetic oligonucleotide
tgacatgggtcaggactgcaggatacatacttttt

SEQ ID NO: 9928 - DNA, 35 bp, Artificial Sequence
  Synthetic oligonucleotide
tgaccaggctcggccgtaaccgcacttactaaagt

SEQ ID NO: 9929 - DNA, 35 bp, Artificial Sequence
  Synthetic oligonucleotide
tgagcaccccggaaaggcgacgctacatactgagt

SEQ ID NO: 9930 - DNA, 36 bp, Artificial Sequence
  Synthetic oligonucleotide
tgtcaaccacatccgcaagagacgagcgatctacca

SEQ ID NO: 9931 - DNA, 37 bp, Artificial Sequence
  Synthetic oligonucleotide
aaagacgcgcaaagttaggtaagaaatcgtgaccgga

SEQ ID NO: 9932 - DNA, 38 bp, Artificial Sequence
  Synthetic oligonucleotide
aacagcacggcgcaaggagtgcctcaaactgttggtga

SEQ ID NO: 9933 - DNA, 36 bp, Artificial Sequence
  Synthetic oligonucleotide
aacgccaaccccgtagtttagtctgtgcgatttgca

SEQ ID NO: 9934 - DNA, 38 bp, Artificial Sequence
  Synthetic oligonucleotide
aagccaggggcacaggcggaagggtcagtgtctcgtga

SEQ ID NO: 9935 - DNA, 36 bp, Artificial Sequence
  Synthetic oligonucleotide
acacgccccgtgccgatatggtacacacccatgcca

SEQ ID NO: 9936 - DNA, 35 bp, Artificial Sequence
  Synthetic oligonucleotide
acacgcgaagcaccgatgtagttctctgttattat

SEQ ID NO: 9937 - DNA, 35 bp, Artificial Sequence
  Synthetic oligonucleotide
acacgtgagccgtcttggctatgctgccacactac

SEQ ID NO: 9938 - DNA, 35 bp, Artificial Sequence
  Synthetic oligonucleotide
agtgacaggcctgaggtggtgcctggaacggaacg

SEQ ID NO: 9939 - DNA, 36 bp, Artificial Sequence
  Synthetic oligonucleotide
atgcatacggtcgcgatgtcggggtctcatttctaa

SEQ ID NO: 9940 - DNA, 35 bp, Artificial Sequence
  Synthetic oligonucleotide
atgcgccccagatctctctggataagctctattag

SEQ ID NO: 9941 - DNA, 36 bp, Artificial Sequence
  Synthetic oligonucleotide
atgggctgaggaacggacagtgactattcgtacgta

SEQ ID NO: 9942 - DNA, 36 bp, Artificial Sequence
  Synthetic oligonucleotide
cacgaaggtcagtcgatgtcctgacaaattctcaaa

SEQ ID NO: 9943 - DNA, 37 bp, Artificial Sequence
  Synthetic oligonucleotide
gacacaaacgtactgtcactgccatactggttattga

SEQ ID NO: 9944 - DNA, 35 bp, Artificial Sequence
  Synthetic oligonucleotide
gacatccgtcaaagcctaaccacgtgtacgcccgc

SEQ ID NO: 9945 - DNA, 35 bp, Artificial Sequence
  Synthetic oligonucleotide
gagatcgacgtagggcaggtcacacatctcacttc

SEQ ID NO: 9946 - DNA, 35 bp, Artificial Sequence
  Synthetic oligonucleotide
gatggggccgaaaaggcaaattataggaggcgaat

SEQ ID NO: 9947 - DNA, 38 bp, Artificial Sequence
  Synthetic oligonucleotide
gattacgcccaacgagcagtcagtcgttaccacgatga

SEQ ID NO: 9948 - DNA, 38 bp, Artificial Sequence
  Synthetic oligonucleotide
gcaaacgccttgcatatgtaccgcatgaccagtattga

SEQ ID NO: 9949 - DNA, 36 bp, Artificial Sequence
  Synthetic oligonucleotide
gcatgggagggaggattgaaagtcgtagtgggagaa

SEQ ID NO: 9950 - DNA, 35 bp, Artificial Sequence
  Synthetic oligonucleotide
gccaccacaatgccactcacacggatcctccgcct

SEQ ID NO: 9951 - DNA, 35 bp, Artificial Sequence
  Synthetic oligonucleotide
gccgcaggcgcaacacttgtcacctcacagaatac

SEQ ID NO: 9952 - DNA, 35 bp, Artificial Sequence
  Synthetic oligonucleotide
gctgcccacgcattatatagggtacttgcggaggc

SEQ ID NO: 9953 - DNA, 38 bp, Artificial Sequence
  Synthetic oligonucleotide
ggacaagccaaacgcggtaaaagcagaagcgtaagtga

SEQ ID NO: 9954 - DNA, 35 bp, Artificial Sequence
  Synthetic oligonucleotide
gggtgcgtatccaagtcatggttcgtggttggtac

SEQ ID NO: 9955 - DNA, 36 bp, Artificial Sequence
  Synthetic oligonucleotide
gtacacgcaccatagccactatctccgggtgggcaa

SEQ ID NO: 9956 - DNA, 35 bp, Artificial Sequence
  Synthetic oligonucleotide
gtcacgtgctgggagtgcatacttaagtccatagt

SEQ ID NO: 9957 - DNA, 35 bp, Artificial Sequence
  Synthetic oligonucleotide
gtccacgcaaaggctgttttctcgtaatacgtctc

SEQ ID NO: 9958 - DNA, 36 bp, Artificial Sequence
  Synthetic oligonucleotide
gtccagggggcgatgacactcaatagccatgctaca

SEQ ID NO: 9959 - DNA, 37 bp, Artificial Sequence
  Synthetic oligonucleotide
gtgcgctccaatgcccctaacatcctcgtatctggga

SEQ ID NO: 9960 - DNA, 35 bp, Artificial Sequence
  Synthetic oligonucleotide
gtggatcgcgtgccttgtctagtcctgtgcgattg

SEQ ID NO: 9961 - DNA, 36 bp, Artificial Sequence
  Synthetic oligonucleotide
taaccaccgctcatcacctttgcacttagggtggga

SEQ ID NO: 9962 - DNA, 36 bp, Artificial Sequence
  Synthetic oligonucleotide
taaccccacgtcaagagggacatatacccacgttta

SEQ ID NO: 9963 - DNA, 36 bp, Artificial Sequence
  Synthetic oligonucleotide
tacgcgagggtttcggaagccagcttgcacacacga

SEQ ID NO: 9964 - DNA, 36 bp, Artificial Sequence
  Synthetic oligonucleotide
tcaaccaacgagtctggccggttgaacgtagtgcaa

SEQ ID NO: 9965 - DNA, 38 bp, Artificial Sequence
  Synthetic oligonucleotide
tcaacgtccgccatgcatgatcggccaacaaaagatga

SEQ ID NO: 9966 - DNA, 37 bp, Artificial Sequence
  Synthetic oligonucleotide
tcacaagcgacatctgcggtacatgtgatagtgttga

SEQ ID NO: 9967 - DNA, 36 bp, Artificial Sequence
  Synthetic oligonucleotide
tcagtccccaccccctcgtgaatctgacacgcacta

SEQ ID NO: 9968 - DNA, 37 bp, Artificial Sequence
  Synthetic oligonucleotide
tgacgatgccggagatattgttatgaatagtcgagga

SEQ ID NO: 9969 - DNA, 35 bp, Artificial Sequence
  Synthetic oligonucleotide
tgcgcgacgagcctaccttaacgcatagagagggc

SEQ ID NO: 9970 - DNA, 35 bp, Artificial Sequence
  Synthetic oligonucleotide
tgtgccccatcaagccagcgtaaccgtcgcctttc

SEQ ID NO: 9971 - DNA, 35 bp, Artificial Sequence
  Synthetic oligonucleotide
tgtgcccccaggcatatacacaggttgcccactaa

SEQ ID NO: 9972 - DNA, 35 bp, Artificial Sequence
  Synthetic oligonucleotide
aaccgccgcccacatgtacacgacgtaagcagtcg

SEQ ID NO: 9973 - DNA, 35 bp, Artificial Sequence
  Synthetic oligonucleotide
acaacacgcaactacctgcaaaaagccttccaacg

SEQ ID NO: 9974 - DNA, 35 bp, Artificial Sequence
  Synthetic oligonucleotide
acagacacgatagctaaaagaggtgacagtacgtg

SEQ ID NO: 9975 - DNA, 35 bp, Artificial Sequence
  Synthetic oligonucleotide
acatgcacacgcatccggacgacataataactgct

SEQ ID NO: 9976 - DNA, 35 bp, Artificial Sequence
  Synthetic oligonucleotide
agacaacccacagcataaattcggactgcaggttt

SEQ ID NO: 9977 - DNA, 36 bp, Artificial Sequence
  Synthetic oligonucleotide
atgtcccaactgcagcccgtcgccgagcaaaagtaa

SEQ ID NO: 9978 - DNA, 37 bp, Artificial Sequence
  Synthetic oligonucleotide
cgcgccgatgcgtgacaaatatgcgtaagtagtgaga

SEQ ID NO: 9979 - DNA, 36 bp, Artificial Sequence
  Synthetic oligonucleotide
gaacccgacgccgctgctcaagaggcaacttactga

SEQ ID NO: 9980 - DNA, 37 bp, Artificial Sequence
  Synthetic oligonucleotide
gacacgacaaggggactgcacgaccgtgatgacatga

SEQ ID NO: 9981 - DNA, 38 bp, Artificial Sequence
  Synthetic oligonucleotide
gacgcatcaaacgctcgaccgcggacatacatgaatga

SEQ ID NO: 9982 - DNA, 37 bp, Artificial Sequence
  Synthetic oligonucleotide
gatgccaaccgtgatattagcgcaaacagtaggcaga

SEQ ID NO: 9983 - DNA, 35 bp, Artificial Sequence
  Synthetic oligonucleotide
gccacacgccgagaagacagccactagagtgtacg

SEQ ID NO: 9984 - DNA, 35 bp, Artificial Sequence
  Synthetic oligonucleotide
gccgaaaccggcgtaccacgtgaaattaactcgcc

SEQ ID NO: 9985 - DNA, 37 bp, Artificial Sequence
  Synthetic oligonucleotide
gcgagccaagctatttccatgcctattttaccattga

SEQ ID NO: 9986 - DNA, 36 bp, Artificial Sequence
  Synthetic oligonucleotide
gcgcaaccaagggtcaggtatggcgtccaagactga

SEQ ID NO: 9987 - DNA, 37 bp, Artificial Sequence
  Synthetic oligonucleotide
taggtgcacagcggatcaaagaggacactccttttga

SEQ ID NO: 9988 - DNA, 35 bp, Artificial Sequence
  Synthetic oligonucleotide
tcacccaccatcagaatgatcgatgacgttgctac

SEQ ID NO: 9989 - DNA, 35 bp, Artificial Sequence
  Synthetic oligonucleotide
tcagaccagtcacagctagatcaatgtacagtcgc

SEQ ID NO: 9990 - DNA, 38 bp, Artificial Sequence
  Synthetic oligonucleotide
tcagataggcaagggcacagttatcaggacaaaattga

SEQ ID NO: 9991 - DNA, 36 bp, Artificial Sequence
  Synthetic oligonucleotide
tccacggaggtgggtcgacgtgtggttcgaaggaaa

SEQ ID NO: 9992 - DNA, 37 bp, Artificial Sequence
  Synthetic oligonucleotide
tccgacgtagacaacggaagagagcttgtgggcaaga

SEQ ID NO: 9993 - DNA, 37 bp, Artificial Sequence
  Synthetic oligonucleotide
tgacaacggcgacggagttacagatacggtaaggaga

SEQ ID NO: 9994 - DNA, 36 bp, Artificial Sequence
  Synthetic oligonucleotide
tgacgggcaagtagtgtagatctgccttgaatacga

SEQ ID NO: 9995 - DNA, 35 bp, Artificial Sequence
  Synthetic oligonucleotide
tgtggttgcagtccgcccctatagtacaacgttta

SEQ ID NO: 9996 - DNA, 37 bp, Artificial Sequence
  Synthetic oligonucleotide
ttgagcccccctagtgaataacgacgtgtgggcgaga

SEQ ID NO: 9997 - DNA, 37 bp, Artificial Sequence
  Synthetic oligonucleotide
aaccccatgccgaaccagacggtgatgtcccatgaga

SEQ ID NO: 9998 - DNA, 35 bp, Artificial Sequence
  Synthetic oligonucleotide
acactcacaacctcatgcgcgtttacttatatccc

SEQ ID NO: 9999 - DNA, 36 bp, Artificial Sequence
  Synthetic oligonucleotide
accacaaccccgtagccctaccaccccgtccgcaca

SEQ ID NO: 10000 - DNA, 36 bp, Artificial Sequence
  Synthetic oligonucleotide
acgaacgacgccagtagagcctttgaagggagttga

SEQ ID NO: 10001 - DNA, 35 bp, Artificial Sequence
  Synthetic oligonucleotide
actacgcgcaatgagtacatgctacctataaggat

SEQ ID NO: 10002 - DNA, 35 bp, Artificial Sequence
  Synthetic oligonucleotide
atccgcgcggatgtatctccctccgtacccttatg

SEQ ID NO: 10003 - DNA, 38 bp, Artificial Sequence
  Synthetic oligonucleotide
gaacccagccggcggtccaagaggattatgatgggtga

SEQ ID NO: 10004 - DNA, 35 bp, Artificial Sequence
  Synthetic oligonucleotide
gacaacacgttcaccatgtagacctgtacggactg

SEQ ID NO: 10005 - DNA, 38 bp, Artificial Sequence
  Synthetic oligonucleotide
gacacgagtagacgtgatcttaagagcacagtaggtga

SEQ ID NO: 10006 - DNA, 38 bp, Artificial Sequence
  Synthetic oligonucleotide
gaccacgccaaaagttaccactgcatgatgctgagtga

SEQ ID NO: 10007 - DNA, 35 bp, Artificial Sequence
  Synthetic oligonucleotide
gacgcacccggaccccgcacatgatctgcaacagc

SEQ ID NO: 10008 - DNA, 35 bp, Artificial Sequence
  Synthetic oligonucleotide
gacgtccgtccatgttgaacagacacgtgcatccg

SEQ ID NO: 10009 - DNA, 36 bp, Artificial Sequence
  Synthetic oligonucleotide
gaggacgtgcagactgtagtactagtctatcagtaa

SEQ ID NO: 10010 - DNA, 36 bp, Artificial Sequence
  Synthetic oligonucleotide
gatgcgccacccatacgcgtaggacgtacaggagta

SEQ ID NO: 10011 - DNA, 36 bp, Artificial Sequence
  Synthetic oligonucleotide
gcaaccgactagtcagaaagcgaaaagttgtcccta

SEQ ID NO: 10012 - DNA, 37 bp, Artificial Sequence
  Synthetic oligonucleotide
gccaaccaccagttctcgggacaagtcatgagcccga

SEQ ID NO: 10013 - DNA, 36 bp, Artificial Sequence
  Synthetic oligonucleotide
gccacgcgaagcaacactcagcctcatcgaccggta

SEQ ID NO: 10014 - DNA, 35 bp, Artificial Sequence
  Synthetic oligonucleotide
gcgaagcacccttatagaataatccatcggagcaa

SEQ ID NO: 10015 - DNA, 36 bp, Artificial Sequence
  Synthetic oligonucleotide
gggacatacgcatgggcctgattaggtgaacgatta

SEQ ID NO: 10016 - DNA, 37 bp, Artificial Sequence
  Synthetic oligonucleotide
gtgcccaggtgtacatgtccacaccccagtgttgtga

SEQ ID NO: 10017 - DNA, 38 bp, Artificial Sequence
  Synthetic oligonucleotide
gtggtgcactagggtgacttaaatcttggagactatga

SEQ ID NO: 10018 - DNA, 38 bp, Artificial Sequence
  Synthetic oligonucleotide
gtgtcgcagaggatgtaaccttcatcaccacgatatga

SEQ ID NO: 10019 - DNA, 38 bp, Artificial Sequence
  Synthetic oligonucleotide
taccgcgacgaaggagaaacccatgcatcctgtgttga

SEQ ID NO: 10020 - DNA, 35 bp, Artificial Sequence
  Synthetic oligonucleotide
tcccaaccaaccgatctgtaactccccacgcccca

SEQ ID NO: 10021 - DNA, 37 bp, Artificial Sequence
  Synthetic oligonucleotide
tgacaaacgcaggctccgttcattatcgcccttcgga

SEQ ID NO: 10022 - DNA, 36 bp, Artificial Sequence
  Synthetic oligonucleotide
tgacaccacagcggagtactgacggtcagtttgaaa

SEQ ID NO: 10023 - DNA, 35 bp, Artificial Sequence
  Synthetic oligonucleotide
ttgccatacgcgcctaacgacttaaacctggtggg

SEQ ID NO: 10024 - DNA, 35 bp, Artificial Sequence
  Synthetic oligonucleotide
aaccagcacagtaatgctaataccgttcacctcgt

SEQ ID NO: 10025 - DNA, 37 bp, Artificial Sequence
  Synthetic oligonucleotide
acaccgctgagtggcccagacataggtgccttgaaga

SEQ ID NO: 10026 - DNA, 38 bp, Artificial Sequence
  Synthetic oligonucleotide
acacgaggacgtgctgctggtcgaataagacgttctga

SEQ ID NO: 10027 - DNA, 35 bp, Artificial Sequence
  Synthetic oligonucleotide
acacgccaagccaaggtcaggagtttatgtgacga

SEQ ID NO: 10028 - DNA, 36 bp, Artificial Sequence
  Synthetic oligonucleotide
acacgcctcatggggggtgaagtgggaccgaagtca

SEQ ID NO: 10029 - DNA, 35 bp, Artificial Sequence
  Synthetic oligonucleotide
acatccgcaggacgtgagggagcaactggatggtc

SEQ ID NO: 10030 - DNA, 37 bp, Artificial Sequence
  Synthetic oligonucleotide
accccacctgccgatagctaaaagtcgtacgtttcga

SEQ ID NO: 10031 - DNA, 35 bp, Artificial Sequence
  Synthetic oligonucleotide
accgacgcagagtagttgttaaaatgactctgagg

SEQ ID NO: 10032 - DNA, 37 bp, Artificial Sequence
  Synthetic oligonucleotide
atcgcacccagaagagtacggacaacgttgaatcgga

SEQ ID NO: 10033 - DNA, 35 bp, Artificial Sequence
  Synthetic oligonucleotide
atgacgagcgggtaatccgtgtccatcacaaccga

SEQ ID NO: 10034 - DNA, 38 bp, Artificial Sequence
  Synthetic oligonucleotide
atgccgacgaccaagtgatcacagaacctcaacggtga

SEQ ID NO: 10035 - DNA, 36 bp, Artificial Sequence
  Synthetic oligonucleotide
atgctgcacgcatacgggatattccctcaaatgata

SEQ ID NO: 10036 - DNA, 36 bp, Artificial Sequence
  Synthetic oligonucleotide
ccgggctaaaatgcaccgcacatcgttactgcatga

SEQ ID NO: 10037 - DNA, 35 bp, Artificial Sequence
  Synthetic oligonucleotide
gaacacgtctagcgctattgtgcacatcgcgtaat

SEQ ID NO: 10038 - DNA, 35 bp, Artificial Sequence
  Synthetic oligonucleotide
gaagcacaggagcgcggagtacgttggcttccaat

SEQ ID NO: 10039 - DNA, 38 bp, Artificial Sequence
  Synthetic oligonucleotide
gacaacggggacggcaaataggtagtcgtggatattga

SEQ ID NO: 10040 - DNA, 37 bp, Artificial Sequence
  Synthetic oligonucleotide
gacactcgaggatgatcacactgtattcatgatgaga

SEQ ID NO: 10041 - DNA, 38 bp, Artificial Sequence
  Synthetic oligonucleotide
gacgagataacgtgcacaagcgtaaagccgggatctga

SEQ ID NO: 10042 - DNA, 38 bp, Artificial Sequence
  Synthetic oligonucleotide
gacgtagcattaggacagcattacgagacgagcattga

SEQ ID NO: 10043 - DNA, 37 bp, Artificial Sequence
  Synthetic oligonucleotide
gagagccaaagcaaagacccccgagaacatccttaga

SEQ ID NO: 10044 - DNA, 35 bp, Artificial Sequence
  Synthetic oligonucleotide
gcatgcacagtaaataagcgtgtagcagtgcctaa

SEQ ID NO: 10045 - DNA, 37 bp, Artificial Sequence
  Synthetic oligonucleotide
gccaaccgtgcccaatatacgtcgagacacgtgtaga

SEQ ID NO: 10046 - DNA, 35 bp, Artificial Sequence
  Synthetic oligonucleotide
gcccccaccagctaataataccacgaccttgacgg

SEQ ID NO: 10047 - DNA, 36 bp, Artificial Sequence
  Synthetic oligonucleotide
gccgatacgggacactggtacctacgaactggttta

SEQ ID NO: 10048 - DNA, 36 bp, Artificial Sequence
  Synthetic oligonucleotide
gcctgatcaacgggcgctcaagacaaatccggttca

SEQ ID NO: 10049 - DNA, 38 bp, Artificial Sequence
  Synthetic oligonucleotide
gcgaagacgcggactgcatgatgtctccccctccctga

SEQ ID NO: 10050 - DNA, 37 bp, Artificial Sequence
  Synthetic oligonucleotide
gcgaggtgcctcccaaggtgccaggacgttacgagga

SEQ ID NO: 10051 - DNA, 37 bp, Artificial Sequence
  Synthetic oligonucleotide
gtccaaagcgctgtagaagcgaccctctcgtcttaga

SEQ ID NO: 10052 - DNA, 38 bp, Artificial Sequence
  Synthetic oligonucleotide
gtgccaggcacttgcggtccacaagattgagtttgtga

SEQ ID NO: 10053 - DNA, 36 bp, Artificial Sequence
  Synthetic oligonucleotide
gtgcggatctcggggctaaggaaacagtaggaagga

SEQ ID NO: 10054 - DNA, 37 bp, Artificial Sequence
  Synthetic oligonucleotide
gtgtcacacgcacatggaagagggtcaatgtgtggga

SEQ ID NO: 10055 - DNA, 35 bp, Artificial Sequence
  Synthetic oligonucleotide
taacccaccccgcccagcatgctgcaccttcctta

SEQ ID NO: 10056 - DNA, 38 bp, Artificial Sequence
  Synthetic oligonucleotide
tagcccgtgcatagatagtcgatcgcaagaattcgtga

SEQ ID NO: 10057 - DNA, 36 bp, Artificial Sequence
  Synthetic oligonucleotide
tagtgccgaccgagagggaggtggaggcaatacgca

SEQ ID NO: 10058 - DNA, 35 bp, Artificial Sequence
  Synthetic oligonucleotide
tatgccacgcccacacaccggaaggacaaacgcgc

SEQ ID NO: 10059 - DNA, 38 bp, Artificial Sequence
  Synthetic oligonucleotide
tcacaccctgcgccatacaccacagtccgcctcaatga

SEQ ID NO: 10060 - DNA, 36 bp, Artificial Sequence
  Synthetic oligonucleotide
tcactcaagagcgtccttatcgtctttgaggacaca

SEQ ID NO: 10061 - DNA, 36 bp, Artificial Sequence
  Synthetic oligonucleotide
tgaacacacgaaggaacgtcaatgacacgttggcaa

SEQ ID NO: 10062 - DNA, 35 bp, Artificial Sequence
  Synthetic oligonucleotide
tgaccgacccacccgcacacaacgttttactgttt

SEQ ID NO: 10063 - DNA, 38 bp, Artificial Sequence
  Synthetic oligonucleotide
tgagccgtgcgtacccatgcgtacagctgtcagaatga

SEQ ID NO: 10064 - DNA, 35 bp, Artificial Sequence
  Synthetic oligonucleotide
aacagccgggaaacatccgacgcaataagtctggc

SEQ ID NO: 10065 - DNA, 35 bp, Artificial Sequence
  Synthetic oligonucleotide
aaccacgcaagggttgtacaagactcatagttatg

SEQ ID NO: 10066 - DNA, 38 bp, Artificial Sequence
  Synthetic oligonucleotide
acacaccgcgacgaaatgtgacatctgatctatgctga

SEQ ID NO: 10067 - DNA, 35 bp, Artificial Sequence
  Synthetic oligonucleotide
acacccccacgcgtagtcggtctggggggtctatc

SEQ ID NO: 10068 - DNA, 37 bp, Artificial Sequence
  Synthetic oligonucleotide
acaccgaaacccaatccgtctggccatccgatgttga

SEQ ID NO: 10069 - DNA, 36 bp, Artificial Sequence
  Synthetic oligonucleotide
acacgccgttagcgtagtatggattcggtattaaaa

SEQ ID NO: 10070 - DNA, 37 bp, Artificial Sequence
  Synthetic oligonucleotide
acagacggacgccagtttgcgcaaaatcaacgggtga

SEQ ID NO: 10071 - DNA, 37 bp, Artificial Sequence
  Synthetic oligonucleotide
accacgccaaaatctgcctatgcgtcactacgttaga

SEQ ID NO: 10072 - DNA, 38 bp, Artificial Sequence
  Synthetic oligonucleotide
acgaacacacacaggccgtcgccgctccatgtgcctga

SEQ ID NO: 10073 - DNA, 38 bp, Artificial Sequence
  Synthetic oligonucleotide
actcgagcgggacacgacgtgctcgagcttcgttctga

SEQ ID NO: 10074 - DNA, 36 bp, Artificial Sequence
  Synthetic oligonucleotide
agaccacggctcatgcgctatagatagcccttaata

SEQ ID NO: 10075 - DNA, 38 bp, Artificial Sequence
  Synthetic oligonucleotide
atcgcacaccgcacctctcgtttaacgccattatgtga

SEQ ID NO: 10076 - DNA, 36 bp, Artificial Sequence
  Synthetic oligonucleotide
gacctgtgcccaggttaacctaagtccgaccaccca

SEQ ID NO: 10077 - DNA, 36 bp, Artificial Sequence
  Synthetic oligonucleotide
gacgccaaagcatgcaaggaagtgtgtgtcgactta

SEQ ID NO: 10078 - DNA, 38 bp, Artificial Sequence
  Synthetic oligonucleotide
gacggaccgatccgcccggattatctacgcaattctga

SEQ ID NO: 10079 - DNA, 36 bp, Artificial Sequence
  Synthetic oligonucleotide
gactaacacgcattccagtaccagactcgatcacaa

SEQ ID NO: 10080 - DNA, 38 bp, Artificial Sequence
  Synthetic oligonucleotide
gagcaacacaggctgaattcagtcacatgtgccactga

SEQ ID NO: 10081 - DNA, 35 bp, Artificial Sequence
  Synthetic oligonucleotide
gatacagcccgccgacaaagccgacaacgtaaaag

SEQ ID NO: 10082 - DNA, 37 bp, Artificial Sequence
  Synthetic oligonucleotide
gcatacacacatgcgcaccagtccgtcgaccctacga

SEQ ID NO: 10083 - DNA, 36 bp, Artificial Sequence
  Synthetic oligonucleotide
gccaacgtgctgaggtgtaatgatggaaaggtttca

SEQ ID NO: 10084 - DNA, 35 bp, Artificial Sequence
  Synthetic oligonucleotide
gccacgcaggcaacacgttagtcaccgattcctcg

SEQ ID NO: 10085 - DNA, 37 bp, Artificial Sequence
  Synthetic oligonucleotide
gtactgaccccggcgatcaatgaaggactagactgga

SEQ ID NO: 10086 - DNA, 35 bp, Artificial Sequence
  Synthetic oligonucleotide
gtcaaccactggataggactatgcgaacaagcgtt

SEQ ID NO: 10087 - DNA, 35 bp, Artificial Sequence
  Synthetic oligonucleotide
gtcacagacgaaacgtcatagtcgccgactagtgg

SEQ ID NO: 10088 - DNA, 36 bp, Artificial Sequence
  Synthetic oligonucleotide
gtctacactcaggcaatcgcgtaccccccaacaaaa

SEQ ID NO: 10089 - DNA, 35 bp, Artificial Sequence
  Synthetic oligonucleotide
tcaccccaccgagtatcgaggaagacgagaaggtg

SEQ ID NO: 10090 - DNA, 35 bp, Artificial Sequence
  Synthetic oligonucleotide
tccacgcgacagtaaggcaccactcaccatatcac

SEQ ID NO: 10091 - DNA, 35 bp, Artificial Sequence
  Synthetic oligonucleotide
tcgagagtcccgcgagaaacggttttcgcctttgc

SEQ ID NO: 10092 - DNA, 35 bp, Artificial Sequence
  Synthetic oligonucleotide
tctgcgcaccgcaccatcgttcctcacaaagcatc

SEQ ID NO: 10093 - DNA, 35 bp, Artificial Sequence
  Synthetic oligonucleotide
tgaggacgccgtatcagcatgctttcctacaatct

SEQ ID NO: 10094 - DNA, 38 bp, Artificial Sequence
  Synthetic oligonucleotide
tgcaacaacaccaattctgcttcgggccacggacgtga

SEQ ID NO: 10095 - DNA, 35 bp, Artificial Sequence
  Synthetic oligonucleotide
tgccacccgtccgaatcgcgcgtaactacgtctac

SEQ ID NO: 10096 - DNA, 35 bp, Artificial Sequence
  Synthetic oligonucleotide
ttgcgggaccgtacatgtggcttcaaacgttccta

SEQ ID NO: 10097 - DNA, 38 bp, Artificial Sequence
  Synthetic oligonucleotide
aaccgaggcgatgtctaaactacgtcccaaacggatga

SEQ ID NO: 10098 - DNA, 35 bp, Artificial Sequence
  Synthetic oligonucleotide
acaatgcgtccgttaccaaagcctcaagaaacacg

SEQ ID NO: 10099 - DNA, 36 bp, Artificial Sequence
  Synthetic oligonucleotide
acacacaccgactggcgttactgaccaatcggccaa

SEQ ID NO: 10100 - DNA, 35 bp, Artificial Sequence
  Synthetic oligonucleotide
acatccccagagtccccagaccgttctcagtcatc

SEQ ID NO: 10101 - DNA, 35 bp, Artificial Sequence
  Synthetic oligonucleotide
accccgacggagggggacgtcacgacgcggctctg

SEQ ID NO: 10102 - DNA, 37 bp, Artificial Sequence
  Synthetic oligonucleotide
atcaccaccacggacccagcacgttagtcagtataga

SEQ ID NO: 10103 - DNA, 35 bp, Artificial Sequence
  Synthetic oligonucleotide
atccaccgccgcataatgtatcatcgttccgtcac

SEQ ID NO: 10104 - DNA, 38 bp, Artificial Sequence
  Synthetic oligonucleotide
gaacaccacacaggaagcacattgtcactcattaatga

SEQ ID NO: 10105 - DNA, 35 bp, Artificial Sequence
  Synthetic oligonucleotide
gaaccgcccgaacgaacttcctacatgcccaagcg

SEQ ID NO: 10106 - DNA, 35 bp, Artificial Sequence
  Synthetic oligonucleotide
gacaaccatcacctcgtgcgatcaagtcgtcgtca

SEQ ID NO: 10107 - DNA, 35 bp, Artificial Sequence
  Synthetic oligonucleotide
gacacacgcacacgatttttcctcacggtagctac

SEQ ID NO: 10108 - DNA, 37 bp, Artificial Sequence
  Synthetic oligonucleotide
gacacgatcaggttgcattggaagcctcgtgaaaaga

SEQ ID NO: 10109 - DNA, 38 bp, Artificial Sequence
  Synthetic oligonucleotide
gaccacgcaaacagggagtgagtgcaagtcatgactga

SEQ ID NO: 10110 - DNA, 35 bp, Artificial Sequence
  Synthetic oligonucleotide
gacgcactaaagacagccatctttctgaaatacgt

SEQ ID NO: 10111 - DNA, 38 bp, Artificial Sequence
  Synthetic oligonucleotide
gactcactcacgtcatcagacacttgataaggggttga

SEQ ID NO: 10112 - DNA, 38 bp, Artificial Sequence
  Synthetic oligonucleotide
gccaaccagtctgcgtgttctacaaggacgctaggtga

SEQ ID NO: 10113 - DNA, 35 bp, Artificial Sequence
  Synthetic oligonucleotide
ggaacggactgccaggcgtgaaaaggacgtcaatc

SEQ ID NO: 10114 - DNA, 35 bp, Artificial Sequence
  Synthetic oligonucleotide
gtgaccgcaccagattcatcggagctcaaacaagg

SEQ ID NO: 10115 - DNA, 38 bp, Artificial Sequence
  Synthetic oligonucleotide
gtgcacgtaattgcacgcagtaaggctccatacgttga

SEQ ID NO: 10116 - DNA, 35 bp, Artificial Sequence
  Synthetic oligonucleotide
gtgccgcaccccctcgtgtcccagtcagccctccc

SEQ ID NO: 10117 - DNA, 37 bp, Artificial Sequence
  Synthetic oligonucleotide
taacgggcggtgggtaggaatattaggggacatgcga

SEQ ID NO: 10118 - DNA, 36 bp, Artificial Sequence
  Synthetic oligonucleotide
taccgcaggccaatgcccttttaaagttctctcgta

SEQ ID NO: 10119 - DNA, 36 bp, Artificial Sequence
  Synthetic oligonucleotide
tcaaccgcgcggtctcgaggcgtagtcaatgctaga

SEQ ID NO: 10120 - DNA, 35 bp, Artificial Sequence
  Synthetic oligonucleotide
tcactgctcatttagccagtcccaactggccccca

SEQ ID NO: 10121 - DNA, 37 bp, Artificial Sequence
  Synthetic oligonucleotide
tccgaacgggacggctgcaagatctggtgttccacga

SEQ ID NO: 10122 - DNA, 38 bp, Artificial Sequence
  Synthetic oligonucleotide
tgcaccgacaacggacgcaccttttaaagagggattga

SEQ ID NO: 10123 - DNA, 37 bp, Artificial Sequence
  Synthetic oligonucleotide
tgtacgagcgagaggccaaaggatgcatttgaaagga

SEQ ID NO: 10124 - DNA, 36 bp, Artificial Sequence
  Synthetic oligonucleotide
ttagcaggccggaagggacgcgcataaacgactgta

SEQ ID NO: 10125 - DNA, 35 bp, Artificial Sequence
  Synthetic oligonucleotide
acacacgcaatccaaatcgacgttcacttagacac

SEQ ID NO: 10126 - DNA, 37 bp, Artificial Sequence
  Synthetic oligonucleotide
acccaagccgccggtgcgtatgcatgacaccgtgaga

SEQ ID NO: 10127 - DNA, 38 bp, Artificial Sequence
  Synthetic oligonucleotide
acgcacctaaatagcgacgccactgaccccgtccatga

SEQ ID NO: 10128 - DNA, 38 bp, Artificial Sequence
  Synthetic oligonucleotide
actgccaggccgataagaagggagatggcaattgttga

SEQ ID NO: 10129 - DNA, 38 bp, Artificial Sequence
  Synthetic oligonucleotide
atccagccgccggacggttcagaagtagctgcctttga

SEQ ID NO: 10130 - DNA, 36 bp, Artificial Sequence
  Synthetic oligonucleotide
gaacccagaacggtacgagtcgtcctgcacgaacaa

SEQ ID NO: 10131 - DNA, 36 bp, Artificial Sequence
  Synthetic oligonucleotide
gaagcacccgcccttgctagtctctccgtacaaaaa

SEQ ID NO: 10132 - DNA, 35 bp, Artificial Sequence
  Synthetic oligonucleotide
gacacaggtcaggacaagtacgacggagattgagg

SEQ ID NO: 10133 - DNA, 37 bp, Artificial Sequence
  Synthetic oligonucleotide
gacacattggcgcctagaacaatcgtccactaccgga

SEQ ID NO: 10134 - DNA, 36 bp, Artificial Sequence
  Synthetic oligonucleotide
gacacgtagtcatgcaaggaccgtgtcaaaggttta

SEQ ID NO: 10135 - DNA, 35 bp, Artificial Sequence
  Synthetic oligonucleotide
gcaaacgtacgcatgggaatccttaataagctacg

SEQ ID NO: 10136 - DNA, 38 bp, Artificial Sequence
  Synthetic oligonucleotide
gcacatccggttggaaatttcacgatgtcaacgaatga

SEQ ID NO: 10137 - DNA, 35 bp, Artificial Sequence
  Synthetic oligonucleotide
gcacgcacggttcttagcacttgcggttcgaatcg

SEQ ID NO: 10138 - DNA, 36 bp, Artificial Sequence
  Synthetic oligonucleotide
gccacgtgcaaagttgtccaagtgcgaaaagaaaca

SEQ ID NO: 10139 - DNA, 36 bp, Artificial Sequence
  Synthetic oligonucleotide
gccatggctcgggtggtaagtagcagtattatgctc

SEQ ID NO: 10140 - DNA, 35 bp, Artificial Sequence
  Synthetic oligonucleotide
gccgcaaagtaggtaaatgcagactaagggtactc

SEQ ID NO: 10141 - DNA, 36 bp, Artificial Sequence
  Synthetic oligonucleotide
gtgcgacgagcacacggggctaaggccgtggtgtaa

SEQ ID NO: 10142 - DNA, 37 bp, Artificial Sequence
  Synthetic oligonucleotide
gtgcggtggaagtataggtgttatcacataaggtcga

SEQ ID NO: 10143 - DNA, 38 bp, Artificial Sequence
  Synthetic oligonucleotide
gtggaccgtgggcgggtccgtcctgctagttaccgtga

SEQ ID NO: 10144 - DNA, 36 bp, Artificial Sequence
  Synthetic oligonucleotide
tacagggccagaataacgtctgcgaatgcctaacta

SEQ ID NO: 10145 - DNA, 35 bp, Artificial Sequence
  Synthetic oligonucleotide
taggacgtggggcccataaatgagcggattgcaat

SEQ ID NO: 10146 - DNA, 38 bp, Artificial Sequence
  Synthetic oligonucleotide
tcactcgctcggatgacggaaacgtgcgacaaagctga

SEQ ID NO: 10147 - DNA, 36 bp, Artificial Sequence
  Synthetic oligonucleotide
tcgagccgagcgatgaacggactaggctaagcatta

SEQ ID NO: 10148 - DNA, 35 bp, Artificial Sequence
  Synthetic oligonucleotide
tgtcactgcgggagtcgataggtctgtggggagca

SEQ ID NO: 10149 - DNA, 37 bp, Artificial Sequence
  Synthetic oligonucleotide
ttgcgaagggaagtgctttgatcccaatcatatagga

SEQ ID NO: 10150 - DNA, 37 bp, Artificial Sequence
  Synthetic oligonucleotide
aaccggagcacacgtttagcaacgtcaaacttcacga

SEQ ID NO: 10151 - DNA, 37 bp, Artificial Sequence
  Synthetic oligonucleotide
aatcaaccacaacaactgagctgataaggtcatccga

SEQ ID NO: 10152 - DNA, 35 bp, Artificial Sequence
  Synthetic oligonucleotide
acacccaccagctaattgtttagcccacgtccgaa

SEQ ID NO: 10153 - DNA, 35 bp, Artificial Sequence
  Synthetic oligonucleotide
accacgcggccagggcttcgaaacgcaacatcgcg

SEQ ID NO: 10154 - DNA, 35 bp, Artificial Sequence
  Synthetic oligonucleotide
acgagccggattggggtgcggatcgtacggaccag

SEQ ID NO: 10155 - DNA, 35 bp, Artificial Sequence
  Synthetic oligonucleotide
actgaccccgtgactcggccgacatacgcctgact

SEQ ID NO: 10156 - DNA, 35 bp, Artificial Sequence
  Synthetic oligonucleotide
gaaccaagtgcagtcgatgcgttatgagaatgagt

SEQ ID NO: 10157 - DNA, 37 bp, Artificial Sequence
  Synthetic oligonucleotide
gacaacgcacgcaaacattcgctacagacataccgga

SEQ ID NO: 10158 - DNA, 36 bp, Artificial Sequence
  Synthetic oligonucleotide
gacacagccgcatgggtaattagcaggagggtggga

SEQ ID NO: 10159 - DNA, 38 bp, Artificial Sequence
  Synthetic oligonucleotide
gaccacgcgccgaccgaaagatcagggggacgcgatga

SEQ ID NO: 10160 - DNA, 35 bp, Artificial Sequence
  Synthetic oligonucleotide
gacccatgcgcggataagcgaacgaacgagaccgc

SEQ ID NO: 10161 - DNA, 35 bp, Artificial Sequence
  Synthetic oligonucleotide
gacgcatgcagtgtaggatctcagcaagttgacgc

SEQ ID NO: 10162 - DNA, 37 bp, Artificial Sequence
  Synthetic oligonucleotide
gacgccgaggtttgaggttgcgaggctattttgagga

SEQ ID NO: 10163 - DNA, 36 bp, Artificial Sequence
  Synthetic oligonucleotide
gatgcaatcgtgtaagatgtagcgaagtccagaata

SEQ ID NO: 10164 - DNA, 36 bp, Artificial Sequence
  Synthetic oligonucleotide
gcatcacgagtgttgttggcatagaaaaatagtcga

SEQ ID NO: 10165 - DNA, 35 bp, Artificial Sequence
  Synthetic oligonucleotide
gccgaggagcatcgttaatggggggaaagatcccg

SEQ ID NO: 10166 - DNA, 35 bp, Artificial Sequence
  Synthetic oligonucleotide
gccgggacgctctgctgcaggcccgattcggaggt

SEQ ID NO: 10167 - DNA, 38 bp, Artificial Sequence
  Synthetic oligonucleotide
gcgaaccgcttgtcggtctcagatgctgtacagtatga

SEQ ID NO: 10168 - DNA, 36 bp, Artificial Sequence
  Synthetic oligonucleotide
ggggcaatcgccacaccaacgagagttgcatgctta

SEQ ID NO: 10169 - DNA, 37 bp, Artificial Sequence
  Synthetic oligonucleotide
gtcacggaaccaacctctagaagaatagacatgtgga

SEQ ID NO: 10170 - DNA, 36 bp, Artificial Sequence
  Synthetic oligonucleotide
gtcagtcccgggcagttaatgcaggcatccttctaa

SEQ ID NO: 10171 - DNA, 36 bp, Artificial Sequence
  Synthetic oligonucleotide
gtgatcgccgccgagttaattggctgtccttgaaga

SEQ ID NO: 10172 - DNA, 35 bp, Artificial Sequence
  Synthetic oligonucleotide
gtgggaaccggaatcacctacgttaactatgacgg

SEQ ID NO: 10173 - DNA, 35 bp, Artificial Sequence
  Synthetic oligonucleotide
taagcagaccgcaacgtctcaaatcgccaccaatt

SEQ ID NO: 10174 - DNA, 37 bp, Artificial Sequence
  Synthetic oligonucleotide
tagggggcgccgcacaagtaccgggataggttgaaga

SEQ ID NO: 10175 - DNA, 36 bp, Artificial Sequence
  Synthetic oligonucleotide
tcacgcgggaatggtccatagacagtgtactaacaa

SEQ ID NO: 10176 - DNA, 37 bp, Artificial Sequence
  Synthetic oligonucleotide
tcatgcgcaggtggtatacattccagcaaaaggacga

SEQ ID NO: 10177 - DNA, 38 bp, Artificial Sequence
  Synthetic oligonucleotide
tccacgaggcatgaactcagactaccatccccccgtga

SEQ ID NO: 10178 - DNA, 38 bp, Artificial Sequence
  Synthetic oligonucleotide
tgacgacggtaaggtactattgatagcgcaagtgatga

SEQ ID NO: 10179 - DNA, 36 bp, Artificial Sequence
  Synthetic oligonucleotide
tgcgagaggctaacgtgtagcggatcccaattcgca

SEQ ID NO: 10180 - DNA, 35 bp, Artificial Sequence
  Synthetic oligonucleotide
ttcacgggtcaaacacgtatctggggagggtgggc

SEQ ID NO: 10181 - DNA, 37 bp, Artificial Sequence
  Synthetic oligonucleotide
ttcactgaccccgcaccttacgttaacgacgccccga

SEQ ID NO: 10182 - DNA, 35 bp, Artificial Sequence
  Synthetic oligonucleotide
aacaccggtcgggagttcaatgcagacggtaaggg

SEQ ID NO: 10183 - DNA, 35 bp, Artificial Sequence
  Synthetic oligonucleotide
acacccccacacttcgaatctaacctacgtgagag

SEQ ID NO: 10184 - DNA, 35 bp, Artificial Sequence
  Synthetic oligonucleotide
atcatccaccagtcgcgccctaatacgtatgatgt

SEQ ID NO: 10185 - DNA, 35 bp, Artificial Sequence
  Synthetic oligonucleotide
gaacgcccaaccccggtgacacgcatctcacagac

SEQ ID NO: 10186 - DNA, 37 bp, Artificial Sequence
  Synthetic oligonucleotide
gacccaacagtccgtggcgagcaccaatctgaccaga

SEQ ID NO: 10187 - DNA, 34 bp, Artificial Sequence
  Synthetic oligonucleotide
gacgaagcagtggtgtcaaattgtccaaaggatg

SEQ ID NO: 10188 - DNA, 35 bp, Artificial Sequence
  Synthetic oligonucleotide
gacgaccgccacctctgcacttgctattattccca

SEQ ID NO: 10189 - DNA, 37 bp, Artificial Sequence
  Synthetic oligonucleotide
gacgggtacgcatacagggtgcaacggtaaagtaaga

SEQ ID NO: 10190 - DNA, 37 bp, Artificial Sequence
  Synthetic oligonucleotide
gacggtcgacgtgaaatgactcgggtatgaggcgaga

SEQ ID NO: 10191 - DNA, 36 bp, Artificial Sequence
  Synthetic oligonucleotide
gacgtgagtcacgaaggctttcgactattgcgagca

SEQ ID NO: 10192 - DNA, 35 bp, Artificial Sequence
  Synthetic oligonucleotide
gatgcccaactgagcagagtggacggatatccgtg

SEQ ID NO: 10193 - DNA, 35 bp, Artificial Sequence
  Synthetic oligonucleotide
gatgcgatcggccagtcgttacgagcacacgcact

SEQ ID NO: 10194 - DNA, 35 bp, Artificial Sequence
  Synthetic oligonucleotide
gcacaccccagtgtcaaggacggccaatcgaattg

SEQ ID NO: 10195 - DNA, 35 bp, Artificial Sequence
  Synthetic oligonucleotide
gcaccccgcataatcttttttcaataggtcccaac

SEQ ID NO: 10196 - DNA, 38 bp, Artificial Sequence
  Synthetic oligonucleotide
gcacgaatgaggcacccaggagctgctgtgttgcctga

SEQ ID NO: 10197 - DNA, 35 bp, Artificial Sequence
  Synthetic oligonucleotide
gccacggccgtaacgtggagcacaacatctgggga

SEQ ID NO: 10198 - DNA, 37 bp, Artificial Sequence
  Synthetic oligonucleotide
gccgaacagaggtggaatgtctcttgaactatgaaga

SEQ ID NO: 10199 - DNA, 36 bp, Artificial Sequence
  Synthetic oligonucleotide
gcgcgagcaaggtcttacataacgttacctctcgca

SEQ ID NO: 10200 - DNA, 35 bp, Artificial Sequence
  Synthetic oligonucleotide
gctacctgcaaagtgggtcatttcaaaactaggag

SEQ ID NO: 10201 - DNA, 35 bp, Artificial Sequence
  Synthetic oligonucleotide
gtgtgaggcactccccgctgaacgttacctgctag

SEQ ID NO: 10202 - DNA, 37 bp, Artificial Sequence
  Synthetic oligonucleotide
tacatcgcagttccacggcgaacagctgcgaggggga

SEQ ID NO: 10203 - DNA, 35 bp, Artificial Sequence
  Synthetic oligonucleotide
tacgacacacacacagccatacaagcagccacgcc

SEQ ID NO: 10204 - DNA, 34 bp, Artificial Sequence
  Synthetic oligonucleotide
tagcgcgcaagtgctaacgggtcacgcatagggt

SEQ ID NO: 10205 - DNA, 38 bp, Artificial Sequence
  Synthetic oligonucleotide
tcagccgtgcacctatccagaccccgactattgtatga

SEQ ID NO: 10206 - DNA, 38 bp, Artificial Sequence
  Synthetic oligonucleotide
tgcgcaccggaggagagaccgcacgtatacccgtatga

SEQ ID NO: 10207 - DNA, 38 bp, Artificial Sequence
  Synthetic oligonucleotide
ttggaccgcaggagaatacggctacagtactcacgtga

SEQ ID NO: 10208 - DNA, 37 bp, Artificial Sequence
  Synthetic oligonucleotide
aacaaccacacctagtccggacgagtcgccatcacga

SEQ ID NO: 10209 - DNA, 36 bp, Artificial Sequence
  Synthetic oligonucleotide
aacacacgcagttcagaccttcagaagtgccactga

SEQ ID NO: 10210 - DNA, 35 bp, Artificial Sequence
  Synthetic oligonucleotide
acccagggtgcagatacccaatcactgtctgttgt

SEQ ID NO: 10211 - DNA, 36 bp, Artificial Sequence
  Synthetic oligonucleotide
agtccgccccagcgaacaaacgactctgtgcaggca

SEQ ID NO: 10212 - DNA, 35 bp, Artificial Sequence
  Synthetic oligonucleotide
catagcgcaggcacagacctggcgtacgtagtcga

SEQ ID NO: 10213 - DNA, 38 bp, Artificial Sequence
  Synthetic oligonucleotide
gaacaggtcccaacgtgttttgtgctcagcggtaatga

SEQ ID NO: 10214 - DNA, 37 bp, Artificial Sequence
  Synthetic oligonucleotide
gacaacgactgtggcaatggttatcaagcataatcga

SEQ ID NO: 10215 - DNA, 35 bp, Artificial Sequence
  Synthetic oligonucleotide
gacatcacagcaccaggtcatcatctggacacctt

SEQ ID NO: 10216 - DNA, 35 bp, Artificial Sequence
  Synthetic oligonucleotide
gacgacgacacgttaccaccgcgatcctacgaaag

SEQ ID NO: 10217 - DNA, 35 bp, Artificial Sequence
  Synthetic oligonucleotide
gacgagagtccgcaacttcccggtctgctcacacc

SEQ ID NO: 10218 - DNA, 35 bp, Artificial Sequence
  Synthetic oligonucleotide
gacgaggtggcgaagtcgagcaaagacggtggaaa

SEQ ID NO: 10219 - DNA, 37 bp, Artificial Sequence
  Synthetic oligonucleotide
gacgcaacaccgttatgcgatgacacaccactgctga

SEQ ID NO: 10220 - DNA, 35 bp, Artificial Sequence
  Synthetic oligonucleotide
gatgcagacgtgcacaagcaagacagtgtcccctc

SEQ ID NO: 10221 - DNA, 35 bp, Artificial Sequence
  Synthetic oligonucleotide
gcccaaccatccagcaatgagtcaagttgtcatga

SEQ ID NO: 10222 - DNA, 37 bp, Artificial Sequence
  Synthetic oligonucleotide
gcccagccggcatcactgacttaacacaaagtaatga

SEQ ID NO: 10223 - DNA, 38 bp, Artificial Sequence
  Synthetic oligonucleotide
gccgccgggacgagatgcgtagtaacggaatgcgatga

SEQ ID NO: 10224 - DNA, 35 bp, Artificial Sequence
  Synthetic oligonucleotide
gcgacgcaggccggacacttatgacgctccaattc

SEQ ID NO: 10225 - DNA, 35 bp, Artificial Sequence
  Synthetic oligonucleotide
gtgcggagccagtattcggggtcctcacatagaca

SEQ ID NO: 10226 - DNA, 36 bp, Artificial Sequence
  Synthetic oligonucleotide
gtgggcgacggtgtcccagtaaggaagaccccccca

SEQ ID NO: 10227 - DNA, 38 bp, Artificial Sequence
  Synthetic oligonucleotide
gtgtcgtacgcagatcgggttctaggccgtgagaatga

SEQ ID NO: 10228 - DNA, 35 bp, Artificial Sequence
  Synthetic oligonucleotide
tacatcgccgggatccaccatcgctgacactcttt

SEQ ID NO: 10229 - DNA, 38 bp, Artificial Sequence
  Synthetic oligonucleotide
tacgcaccgcctcacccatcgcaaattcgttccactga

SEQ ID NO: 10230 - DNA, 35 bp, Artificial Sequence
  Synthetic oligonucleotide
tacgtcgaggaatactggaggatgctattgttctg

SEQ ID NO: 10231 - DNA, 35 bp, Artificial Sequence
  Synthetic oligonucleotide
tagccaccgaagctttgtgggcaaagggaccttcg

SEQ ID NO: 10232 - DNA, 37 bp, Artificial Sequence
  Synthetic oligonucleotide
tccactcagcaactggattcgtggcgcttgtacctga

SEQ ID NO: 10233 - DNA, 35 bp, Artificial Sequence
  Synthetic oligonucleotide
tccagagcgcaaacttcctagactgtgtcaccttg

SEQ ID NO: 10234 - DNA, 36 bp, Artificial Sequence
  Synthetic oligonucleotide
tcccatccgcataccatccccccaccacagtttcga

SEQ ID NO: 10235 - DNA, 35 bp, Artificial Sequence
  Synthetic oligonucleotide
tcccggaccacgttacagacccccagacgcgtgag

SEQ ID NO: 10236 - DNA, 36 bp, Artificial Sequence
  Synthetic oligonucleotide
tcgccctggaacatccttcagggatcccggtgtcaa

SEQ ID NO: 10237 - DNA, 35 bp, Artificial Sequence
  Synthetic oligonucleotide
tgaccggatccgtgagttacgcgataacggcaatg

SEQ ID NO: 10238 - DNA, 36 bp, Artificial Sequence
  Synthetic oligonucleotide
tgagtgccgacatcggggtgaaaagtgagtcagaca

SEQ ID NO: 10239 - DNA, 36 bp, Artificial Sequence
  Synthetic oligonucleotide
tgatgcacaggtcgagcgctggacccggcttatgta

SEQ ID NO: 10240 - DNA, 35 bp, Artificial Sequence
  Synthetic oligonucleotide
tgtacaaccgggttggcggtactgtcatcaaaatt

SEQ ID NO: 10241 - DNA, 35 bp, Artificial Sequence
  Synthetic oligonucleotide
tgtcgatgtgcaaatcggaccccggtgtcggaatg

SEQ ID NO: 10242 - DNA, 35 bp, Artificial Sequence
  Synthetic oligonucleotide
aacgagtccaaaggggtaaagaactaatcggtcgc

SEQ ID NO: 10243 - DNA, 37 bp, Artificial Sequence
  Synthetic oligonucleotide
aagacaaggccagaccacagaaggcgtagtcatagga

SEQ ID NO: 10244 - DNA, 35 bp, Artificial Sequence
  Synthetic oligonucleotide
aagccaaccagccaggtaagaatcatagagggtgc

SEQ ID NO: 10245 - DNA, 36 bp, Artificial Sequence
  Synthetic oligonucleotide
acacgatcgcggtgattgcttcgaaagggctaagca

SEQ ID NO: 10246 - DNA, 35 bp, Artificial Sequence
  Synthetic oligonucleotide
acagggccaggtcgaaatgcggtacatcaaatact

SEQ ID NO: 10247 - DNA, 35 bp, Artificial Sequence
  Synthetic oligonucleotide
accccgcaccgagtttcgatatcgcttagtacgat

SEQ ID NO: 10248 - DNA, 35 bp, Artificial Sequence
  Synthetic oligonucleotide
accgcccctaagcccctgagcactgacgcattcga

SEQ ID NO: 10249 - DNA, 35 bp, Artificial Sequence
  Synthetic oligonucleotide
accgtcaccgcatctggcgagtccagctcccactt

SEQ ID NO: 10250 - DNA, 35 bp, Artificial Sequence
  Synthetic oligonucleotide
actgaccccgacttcttaattatcaaacttctcga

SEQ ID NO: 10251 - DNA, 38 bp, Artificial Sequence
  Synthetic oligonucleotide
actgccggaacagacgccgcttacacttggttcaatga

SEQ ID NO: 10252 - DNA, 37 bp, Artificial Sequence
  Synthetic oligonucleotide
agcactgctcgcatgtgataatgtaacgatttactga

SEQ ID NO: 10253 - DNA, 35 bp, Artificial Sequence
  Synthetic oligonucleotide
agtgccgcagccgaatacatccgaacattatcgtt

SEQ ID NO: 10254 - DNA, 36 bp, Artificial Sequence
  Synthetic oligonucleotide
atccacgccctccatcgtgtcaaacttattgaggca

SEQ ID NO: 10255 - DNA, 38 bp, Artificial Sequence
  Synthetic oligonucleotide
atgccacccacgttcgcaattacgcacaaacggcctga

SEQ ID NO: 10256 - DNA, 37 bp, Artificial Sequence
  Synthetic oligonucleotide
atgcgcacgtaacaaattgtgactccctccaccccga

SEQ ID NO: 10257 - DNA, 36 bp, Artificial Sequence
  Synthetic oligonucleotide
catgcgcagagctgattcttttggacaagtgcggaa

SEQ ID NO: 10258 - DNA, 37 bp, Artificial Sequence
  Synthetic oligonucleotide
gacaacaccgtgagggcgaggtaaagggcacaggaga

SEQ ID NO: 10259 - DNA, 36 bp, Artificial Sequence
  Synthetic oligonucleotide
gatgcaaggcgcacgggtgatcgcgttggtggatca

SEQ ID NO: 10260 - DNA, 36 bp, Artificial Sequence
  Synthetic oligonucleotide
gatgcaggccgtcccagctttgtagtgtgagtctca

SEQ ID NO: 10261 - DNA, 35 bp, Artificial Sequence
  Synthetic oligonucleotide
gcaaccccggggagttctcagttaatggttgatgt

SEQ ID NO: 10262 - DNA, 37 bp, Artificial Sequence
  Synthetic oligonucleotide
gcaccagcagtaaacgtttctgtggtcgtttatgtga

SEQ ID NO: 10263 - DNA, 36 bp, Artificial Sequence
  Synthetic oligonucleotide
gccgaccaggcatcgctaacgccaacgctctcacca

SEQ ID NO: 10264 - DNA, 37 bp, Artificial Sequence
  Synthetic oligonucleotide
gccgcgacagcacggtaattcagtgggtactggttga

SEQ ID NO: 10265 - DNA, 36 bp, Artificial Sequence
  Synthetic oligonucleotide
gcgcgaggaaatggggtgggggctggttagacgaca

SEQ ID NO: 10266 - DNA, 35 bp, Artificial Sequence
  Synthetic oligonucleotide
ggacacacggaaggtcaagaatccaaggtgtgccc

SEQ ID NO: 10267 - DNA, 37 bp, Artificial Sequence
  Synthetic oligonucleotide
ggtacgccccccacgctatcgtacatgcctcttttga

SEQ ID NO: 10268 - DNA, 38 bp, Artificial Sequence
  Synthetic oligonucleotide
ggtgccgagcgtgattgggatcactggctaacgagtga

SEQ ID NO: 10269 - DNA, 38 bp, Artificial Sequence
  Synthetic oligonucleotide
gtgcgatccacagagcttaatctctcgtaccatggtga

SEQ ID NO: 10270 - DNA, 38 bp, Artificial Sequence
  Synthetic oligonucleotide
gtgtcgccaatagtcgtatttccggaaatcgtgactga

SEQ ID NO: 10271 - DNA, 37 bp, Artificial Sequence
  Synthetic oligonucleotide
tacacgccgggaggggagggaatgtcgtaggaaggga

SEQ ID NO: 10272 - DNA, 38 bp, Artificial Sequence
  Synthetic oligonucleotide
tagccacactcatgaaggtctgctcgagacgtaactga

SEQ ID NO: 10273 - DNA, 34 bp, Artificial Sequence
  Synthetic oligonucleotide
tagtgtgcagggacagggatgcaataatcaattt

SEQ ID NO: 10274 - DNA, 36 bp, Artificial Sequence
  Synthetic oligonucleotide
tcacccggaacagactgcaacctagtgtcagtccta

SEQ ID NO: 10275 - DNA, 35 bp, Artificial Sequence
  Synthetic oligonucleotide
tctaccaaccgcacaatgtcgctacaacgttgttc

SEQ ID NO: 10276 - DNA, 38 bp, Artificial Sequence
  Synthetic oligonucleotide
ttcaccgccgcaacagtaattgcaccaaatcaaactga

SEQ ID NO: 10277 - DNA, 36 bp, Artificial Sequence
  Synthetic oligonucleotide
ttgccggaggagacgcacacaacgacatgccatgca

SEQ ID NO: 10278 - DNA, 35 bp, Artificial Sequence
  Synthetic oligonucleotide
aacgcgcaaacgagccacagagcctccattcgtac

SEQ ID NO: 10279 - DNA, 38 bp, Artificial Sequence
  Synthetic oligonucleotide
acaacgcgcacaagttgttaggacacatcttagcttga

SEQ ID NO: 10280 - DNA, 38 bp, Artificial Sequence
  Synthetic oligonucleotide
acaacggacagtaggcgaaaacttgtctggtattctga

SEQ ID NO: 10281 - DNA, 38 bp, Artificial Sequence
  Synthetic oligonucleotide
acacccggagcagaccagctaagatccacatgacctga

SEQ ID NO: 10282 - DNA, 37 bp, Artificial Sequence
  Synthetic oligonucleotide
acacgcggaactggaactgtactatgacagtacatga

SEQ ID NO: 10283 - DNA, 35 bp, Artificial Sequence
  Synthetic oligonucleotide
accaccggtcgcatcatctgactacattaactcat

SEQ ID NO: 10284 - DNA, 37 bp, Artificial Sequence
  Synthetic oligonucleotide
accacgacaagagcagaagcagaatcagtctatgcga

SEQ ID NO: 10285 - DNA, 36 bp, Artificial Sequence
  Synthetic oligonucleotide
accgacacttcagatctgaccccgttaccaaccaca

SEQ ID NO: 10286 - DNA, 35 bp, Artificial Sequence
  Synthetic oligonucleotide
atgacgcgcagtagaataaggcaagccgatcgttg

SEQ ID NO: 10287 - DNA, 37 bp, Artificial Sequence
  Synthetic oligonucleotide
gaacccatgaaccggcaagtagcatagacgcgactga

SEQ ID NO: 10288 - DNA, 37 bp, Artificial Sequence
  Synthetic oligonucleotide
gaccaaggtcggttagcgaccagtcggtatacgtcga

SEQ ID NO: 10289 - DNA, 36 bp, Artificial Sequence
  Synthetic oligonucleotide
gaccacacgcggtatacttgcatggacccgtaacta

SEQ ID NO: 10290 - DNA, 36 bp, Artificial Sequence
  Synthetic oligonucleotide
gaccgccgtgatgtcaccgccaaccgcccataacga

SEQ ID NO: 10291 - DNA, 35 bp, Artificial Sequence
  Synthetic oligonucleotide
gacgacaccatcgattctccatttagccaccaccg

SEQ ID NO: 10292 - DNA, 36 bp, Artificial Sequence
  Synthetic oligonucleotide
gacgacgcggagatcatgcccattgctcgtttcgaa

SEQ ID NO: 10293 - DNA, 35 bp, Artificial Sequence
  Synthetic oligonucleotide
gacgcacaagttgccaaatcagttgctgctaaaag

SEQ ID NO: 10294 - DNA, 35 bp, Artificial Sequence
  Synthetic oligonucleotide
gacgcacacgcacagatctgcagcgcatacctatc

SEQ ID NO: 10295 - DNA, 37 bp, Artificial Sequence
  Synthetic oligonucleotide
gacgcaccggtcccagattgtaacggcatggacacga

SEQ ID NO: 10296 - DNA, 36 bp, Artificial Sequence
  Synthetic oligonucleotide
gagcggggccaggtagtccgcgaacgggtgggaaca

SEQ ID NO: 10297 - DNA, 36 bp, Artificial Sequence
  Synthetic oligonucleotide
gatgccgcagtcagttcgtgctagtgtcgtgtccca

SEQ ID NO: 10298 - DNA, 36 bp, Artificial Sequence
  Synthetic oligonucleotide
gcaagccacgcaatgaacgataaactctattataca

SEQ ID NO: 10299 - DNA, 36 bp, Artificial Sequence
  Synthetic oligonucleotide
gcacaccgacagtcgatggacgaggcgtacgtgtaa

SEQ ID NO: 10300 - DNA, 35 bp, Artificial Sequence
  Synthetic oligonucleotide
gccaaccagcaggttcataccgtctagtcctcggt

SEQ ID NO: 10301 - DNA, 37 bp, Artificial Sequence
  Synthetic oligonucleotide
gccacccaggccaggcgggtaagagcctctgactgga

SEQ ID NO: 10302 - DNA, 38 bp, Artificial Sequence
  Synthetic oligonucleotide
gccacgccgcaaagcgcactggacttcaattggactga

SEQ ID NO: 10303 - DNA, 37 bp, Artificial Sequence
  Synthetic oligonucleotide
gcccccacgggcaattaccaccgaactggatacttga

SEQ ID NO: 10304 - DNA, 35 bp, Artificial Sequence
  Synthetic oligonucleotide
gccgacacccgacccaatctcgccactgcacccaa

SEQ ID NO: 10305 - DNA, 35 bp, Artificial Sequence
  Synthetic oligonucleotide
gcgcaagcacggagaacccagcgaggaggtgaacg

SEQ ID NO: 10306 - DNA, 36 bp, Artificial Sequence
  Synthetic oligonucleotide
gctgagccccggtactatctcgttctaattcgccaa

SEQ ID NO: 10307 - DNA, 35 bp, Artificial Sequence
  Synthetic oligonucleotide
ggtgcccatgtgcaacgacgtatagatcccaatcg

SEQ ID NO: 10308 - DNA, 35 bp, Artificial Sequence
  Synthetic oligonucleotide
gtgccacgctgcaatgccgtcacaccaaggagtct

SEQ ID NO: 10309 - DNA, 36 bp, Artificial Sequence
  Synthetic oligonucleotide
gtgggacgccacaacggaccataacagtatccagta

SEQ ID NO: 10310 - DNA, 36 bp, Artificial Sequence
  Synthetic oligonucleotide
tagacgacgccagcagccctagtaacacattgcata

SEQ ID NO: 10311 - DNA, 37 bp, Artificial Sequence
  Synthetic oligonucleotide
tagcgaaccggcggaaggcgtttaagtgcattggtga

SEQ ID NO: 10312 - DNA, 37 bp, Artificial Sequence
  Synthetic oligonucleotide
tatgcggtcacaaggcattacagctatagggttaaga

SEQ ID NO: 10313 - DNA, 38 bp, Artificial Sequence
  Synthetic oligonucleotide
tcaagccgcagacagggaggacgagccgttaatgatga

SEQ ID NO: 10314 - DNA, 35 bp, Artificial Sequence
  Synthetic oligonucleotide
tcacgcgaacggagtggtccatgaggcaagcaccc

SEQ ID NO: 10315 - DNA, 35 bp, Artificial Sequence
  Synthetic oligonucleotide
tccgacgggcccgtaatgatggctttgaaacgacg

SEQ ID NO: 10316 - DNA, 37 bp, Artificial Sequence
  Synthetic oligonucleotide
tccggtcggaacaggaacgtactggggaaccggccga

SEQ ID NO: 10317 - DNA, 37 bp, Artificial Sequence
  Synthetic oligonucleotide
tgacagttcacagtacataaacgccatctcctgggga

SEQ ID NO: 10318 - DNA, 38 bp, Artificial Sequence
  Synthetic oligonucleotide
tgacgcaggactatcaaagggtccgtcgctcccactga

SEQ ID NO: 10319 - DNA, 38 bp, Artificial Sequence
  Synthetic oligonucleotide
tgacgtaggcaacggatgaggcaattgacacgtgttga

SEQ ID NO: 10320 - DNA, 35 bp, Artificial Sequence
  Synthetic oligonucleotide
tgagccgacaggcaaacggcggagataggttcgtc

SEQ ID NO: 10321 - DNA, 35 bp, Artificial Sequence
  Synthetic oligonucleotide
tgcccaatacgtggaaagggtaaacgattgcatgg

SEQ ID NO: 10322 - DNA, 35 bp, Artificial Sequence
  Synthetic oligonucleotide
tgcgacccgtgctgtacgtagaaacttgtgtagct

SEQ ID NO: 10323 - DNA, 38 bp, Artificial Sequence
  Synthetic oligonucleotide
tgcgcatgccatcagcaacgggcactccggactcctga

SEQ ID NO: 10324 - DNA, 35 bp, Artificial Sequence
  Synthetic oligonucleotide
tgtgccaagcgcctaatctactgacggcctggggg

SEQ ID NO: 10325 - DNA, 36 bp, Artificial Sequence
  Synthetic oligonucleotide
aacacacgccaaattgaatcgaagcagagctactca

SEQ ID NO: 10326 - DNA, 36 bp, Artificial Sequence
  Synthetic oligonucleotide
aacaccgcacgtctagaaatgcacgttttatacaca

SEQ ID NO: 10327 - DNA, 35 bp, Artificial Sequence
  Synthetic oligonucleotide
aacgacgccggatcgcgataaggggtcgaccgtga

SEQ ID NO: 10328 - DNA, 35 bp, Artificial Sequence
  Synthetic oligonucleotide
aactgctgccagtctgattaccacagtaactacaa

SEQ ID NO: 10329 - DNA, 35 bp, Artificial Sequence
  Synthetic oligonucleotide
acctgacgccagtagaccacgcatgaccgaaaatc

SEQ ID NO: 10330 - DNA, 37 bp, Artificial Sequence
  Synthetic oligonucleotide
acgtgagccacgcgaaatgacgcctaaccaagatgga

SEQ ID NO: 10331 - DNA, 38 bp, Artificial Sequence
  Synthetic oligonucleotide
agcccgtgaaggtggatcctgcaacggaccatgcttga

SEQ ID NO: 10332 - DNA, 37 bp, Artificial Sequence
  Synthetic oligonucleotide
atccaactgcgaccaaatgacgtgtaggaggtagaga

SEQ ID NO: 10333 - DNA, 37 bp, Artificial Sequence
  Synthetic oligonucleotide
atgccaccaacgcatctttagctaaggtccgtcaaga

SEQ ID NO: 10334 - DNA, 37 bp, Artificial Sequence
  Synthetic oligonucleotide
gaagcacagtcagccactaccgccaagttcgaaacga

SEQ ID NO: 10335 - DNA, 35 bp, Artificial Sequence
  Synthetic oligonucleotide
gacacgctgcagactcgatatcgtgggactgtggt

SEQ ID NO: 10336 - DNA, 34 bp, Artificial Sequence
  Synthetic oligonucleotide
gacatcaccggagaccttcagctgtgatacttgg

SEQ ID NO: 10337 - DNA, 38 bp, Artificial Sequence
  Synthetic oligonucleotide
gacgaagtcgcaaaggtcgagtggacgtctcatactga

SEQ ID NO: 10338 - DNA, 37 bp, Artificial Sequence
  Synthetic oligonucleotide
gacgcatcatgtagcacacactcgtcagacgtagtga

SEQ ID NO: 10339 - DNA, 35 bp, Artificial Sequence
  Synthetic oligonucleotide
gagcgggaggtacattccgaaagcaaacgtgcggt

SEQ ID NO: 10340 - DNA, 38 bp, Artificial Sequence
  Synthetic oligonucleotide
gatccaacaggcccaggcggaataggaggcaagtgaga

SEQ ID NO: 10341 - DNA, 38 bp, Artificial Sequence
  Synthetic oligonucleotide
gcacaacgccagtcagtatcaagagatacagaacatga

SEQ ID NO: 10342 - DNA, 36 bp, Artificial Sequence
  Synthetic oligonucleotide
gccacgatgcagggaagttgcgacgttcgcgtgcta

SEQ ID NO: 10343 - DNA, 38 bp, Artificial Sequence
  Synthetic oligonucleotide
gcgaaagcacaggtgttcagacaggaaggattcattga

SEQ ID NO: 10344 - DNA, 35 bp, Artificial Sequence
  Synthetic oligonucleotide
gctgccccaatctgtggaacttgcccaccttccac

SEQ ID NO: 10345 - DNA, 37 bp, Artificial Sequence
  Synthetic oligonucleotide
gtcacccgcagaagttagtgtttcgtgaccaacccga

SEQ ID NO: 10346 - DNA, 36 bp, Artificial Sequence
  Synthetic oligonucleotide
gtcatagcctgccttgcgttggagtagtgcgtaaaa

SEQ ID NO: 10347 - DNA, 35 bp, Artificial Sequence
  Synthetic oligonucleotide
gtcgcaacagaaggcatgctgctaccactccacaa

SEQ ID NO: 10348 - DNA, 38 bp, Artificial Sequence
  Synthetic oligonucleotide
gtgacgtgacagtgcgggcgaggtgacaatcagtatga

SEQ ID NO: 10349 - DNA, 38 bp, Artificial Sequence
  Synthetic oligonucleotide
gtgtgctcgaggggcgatgtcgtagcagtcttcgttga

SEQ ID NO: 10350 - DNA, 38 bp, Artificial Sequence
  Synthetic oligonucleotide
taccacgccacgtacctctgacggtcctaactatgtga

SEQ ID NO: 10351 - DNA, 36 bp, Artificial Sequence
  Synthetic oligonucleotide
taccgccgaaaagcgacacttcattaacgtcgacca

SEQ ID NO: 10352 - DNA, 37 bp, Artificial Sequence
  Synthetic oligonucleotide
tcaagcgcaccagcgttgactgccgtaccaagcatga

SEQ ID NO: 10353 - DNA, 36 bp, Artificial Sequence
  Synthetic oligonucleotide
tcacacacagcctccaaggtcctaagtccgcgctaa

SEQ ID NO: 10354 - DNA, 37 bp, Artificial Sequence
  Synthetic oligonucleotide
tcacgaacacctcagatcatcctggatactttcgaga

SEQ ID NO: 10355 - DNA, 36 bp, Artificial Sequence
  Synthetic oligonucleotide
tcatgctgcattctgtgcacaacgaaccatctacca

SEQ ID NO: 10356 - DNA, 35 bp, Artificial Sequence
  Synthetic oligonucleotide
tccctccccaagtaaattgactcctctgtccttcg

SEQ ID NO: 10357 - DNA, 38 bp, Artificial Sequence
  Synthetic oligonucleotide
tcctgtgcagtacgctaagtcgaaagaagctgtagtga

SEQ ID NO: 10358 - DNA, 36 bp, Artificial Sequence
  Synthetic oligonucleotide
tgacggctgaggttcgttcgaaagacgtcaacgtta

SEQ ID NO: 10359 - DNA, 35 bp, Artificial Sequence
  Synthetic oligonucleotide
tgccacacgtagtcccacaccacccagaccctggt

SEQ ID NO: 10360 - DNA, 37 bp, Artificial Sequence
  Synthetic oligonucleotide
ttgtgccgtcacaaggtatctagtggagcggtgtgga

SEQ ID NO: 10361 - DNA, 36 bp, Artificial Sequence
  Synthetic oligonucleotide
acaacccgaccggtggtatgcgattgcaagtggtca

SEQ ID NO: 10362 - DNA, 35 bp, Artificial Sequence
  Synthetic oligonucleotide
acacggtgcaagcctatcagctccatggggtgaca

SEQ ID NO: 10363 - DNA, 38 bp, Artificial Sequence
  Synthetic oligonucleotide
acatgcccaaattgccgaacaccgtcccattccattga

SEQ ID NO: 10364 - DNA, 38 bp, Artificial Sequence
  Synthetic oligonucleotide
accacgacaacggtaaggcggaacgagggtgagactga

SEQ ID NO: 10365 - DNA, 36 bp, Artificial Sequence
  Synthetic oligonucleotide
accgacaggtacgtgctgttttgagggctattacca

SEQ ID NO: 10366 - DNA, 38 bp, Artificial Sequence
  Synthetic oligonucleotide
acgactgagccgaggtttcatgatagccgcacacatga

SEQ ID NO: 10367 - DNA, 35 bp, Artificial Sequence
  Synthetic oligonucleotide
agacacaccccagtgtacgttaaacaacgggcggc

SEQ ID NO: 10368 - DNA, 35 bp, Artificial Sequence
  Synthetic oligonucleotide
agacacatggagacatacgtgtcagctaaacctat

SEQ ID NO: 10369 - DNA, 37 bp, Artificial Sequence
  Synthetic oligonucleotide
agcctcacatggggagccggctgcaagcccagaacga

SEQ ID NO: 10370 - DNA, 38 bp, Artificial Sequence
  Synthetic oligonucleotide
agtccaacaccacatgcagtctcagggacgtagcctga

SEQ ID NO: 10371 - DNA, 37 bp, Artificial Sequence
  Synthetic oligonucleotide
atcccagcgcaaaaactgtctgtcgtcccaacgatga

SEQ ID NO: 10372 - DNA, 35 bp, Artificial Sequence
  Synthetic oligonucleotide
gaaacgccaactgattgtcagtgtcccaacattgt

SEQ ID NO: 10373 - DNA, 35 bp, Artificial Sequence
  Synthetic oligonucleotide
gacatcagcagccaattaaggttcgtactactgtg

SEQ ID NO: 10374 - DNA, 37 bp, Artificial Sequence
  Synthetic oligonucleotide
gacatcaggcagattcggggacgtctggttttgtaga

SEQ ID NO: 10375 - DNA, 36 bp, Artificial Sequence
  Synthetic oligonucleotide
gacgacgccggaagcgaacctggaaacgggacgtta

SEQ ID NO: 10376 - DNA, 36 bp, Artificial Sequence
  Synthetic oligonucleotide
gacgtgccggccatacgcatatagacgttgaaggaa

SEQ ID NO: 10377 - DNA, 36 bp, Artificial Sequence
  Synthetic oligonucleotide
gagacaggcgcaagtgttgagttgaagcgtttaaca

SEQ ID NO: 10378 - DNA, 35 bp, Artificial Sequence
  Synthetic oligonucleotide
gagggccactcagacgtcgatactggatgggttac

SEQ ID NO: 10379 - DNA, 36 bp, Artificial Sequence
  Synthetic oligonucleotide
gatgcacacacaatcggatcgaatacaggttggcaa

SEQ ID NO: 10380 - DNA, 37 bp, Artificial Sequence
  Synthetic oligonucleotide
gatgcacattcatcgcgctcgaaccaacccgtcatga

SEQ ID NO: 10381 - DNA, 38 bp, Artificial Sequence
  Synthetic oligonucleotide
gatgccaaggtgcacatgctgacgagactaggtgctga

SEQ ID NO: 10382 - DNA, 35 bp, Artificial Sequence
  Synthetic oligonucleotide
gcaacactcacacagagcaccgagacgccatagtt

SEQ ID NO: 10383 - DNA, 35 bp, Artificial Sequence
  Synthetic oligonucleotide
gcaaccgagccatgacatcaggagaactcttggga

SEQ ID NO: 10384 - DNA, 36 bp, Artificial Sequence
  Synthetic oligonucleotide
gcacgacacaggtgcggcgtgctgccacatctaata

SEQ ID NO: 10385 - DNA, 36 bp, Artificial Sequence
  Synthetic oligonucleotide
gccaaccaccacactcagaccagagcgccgtctgga

SEQ ID NO: 10386 - DNA, 38 bp, Artificial Sequence
  Synthetic oligonucleotide
gccacgggagtcatcgaacgagtcaagtgcctgtttga

SEQ ID NO: 10387 - DNA, 37 bp, Artificial Sequence
  Synthetic oligonucleotide
gcgaaagcacggatgtcaaacttcgaacaagtgggga

SEQ ID NO: 10388 - DNA, 37 bp, Artificial Sequence
  Synthetic oligonucleotide
gcgtgcgataagctgttagtgtctactagaccaatga

SEQ ID NO: 10389 - DNA, 36 bp, Artificial Sequence
  Synthetic oligonucleotide
ggagccacagaagtagtagcatgtaacttgtatata

SEQ ID NO: 10390 - DNA, 36 bp, Artificial Sequence
  Synthetic oligonucleotide
gtgtacgcccgatgatccccacgaaaaccgccccca

SEQ ID NO: 10391 - DNA, 35 bp, Artificial Sequence
  Synthetic oligonucleotide
gttgaaccccagttgctaaacaccccagactcatg

SEQ ID NO: 10392 - DNA, 35 bp, Artificial Sequence
  Synthetic oligonucleotide
tacgcgcgcagatgacacggacgcaccgtatataa

SEQ ID NO: 10393 - DNA, 37 bp, Artificial Sequence
  Synthetic oligonucleotide
tacgcgtagagcgcccaaaccttaaccataaagtcga

SEQ ID NO: 10394 - DNA, 36 bp, Artificial Sequence
  Synthetic oligonucleotide
tagtcaggccaaagtgaattgaaggcgaaagaaata

SEQ ID NO: 10395 - DNA, 35 bp, Artificial Sequence
  Synthetic oligonucleotide
tatgacgagccgttgcatctactagctcctggctc

SEQ ID NO: 10396 - DNA, 35 bp, Artificial Sequence
  Synthetic oligonucleotide
tcacagcccccctttccgttactcggatgtgttaa

SEQ ID NO: 10397 - DNA, 35 bp, Artificial Sequence
  Synthetic oligonucleotide
tccacgtgcggtcaccagtgtgtaagtccctgcat

SEQ ID NO: 10398 - DNA, 36 bp, Artificial Sequence
  Synthetic oligonucleotide
tcttcgcatcgaccagacccccagacttgggtacca

SEQ ID NO: 10399 - DNA, 35 bp, Artificial Sequence
  Synthetic oligonucleotide
tgaaccagggtgagagggtagaaacgcctcgtggt

SEQ ID NO: 10400 - DNA, 36 bp, Artificial Sequence
  Synthetic oligonucleotide
tgagaccgaagatggaaggccaggcgagtgcactca

SEQ ID NO: 10401 - DNA, 35 bp, Artificial Sequence
  Synthetic oligonucleotide
tgtcgcatagccgacaaatcacttgaaatgccttc

SEQ ID NO: 10402 - DNA, 35 bp, Artificial Sequence
  Synthetic oligonucleotide
ttgccaatcgcagacaccgcatgatgatcttaaca

SEQ ID NO: 10403 - DNA, 38 bp, Artificial Sequence
  Synthetic oligonucleotide
tttgcgcacgggtgggtaacgggagtattaaacgttga

SEQ ID NO: 10404 - DNA, 37 bp, Artificial Sequence
  Synthetic oligonucleotide
aacgagcaccagtcaggtgggtagggagggttgaaga

SEQ ID NO: 10405 - DNA, 38 bp, Artificial Sequence
  Synthetic oligonucleotide
aacgcgggaaggagtggttgtgacgaagatggtggtga

SEQ ID NO: 10406 - DNA, 35 bp, Artificial Sequence
  Synthetic oligonucleotide
acaacacgcgggactattccgacagtttcgtctgt

SEQ ID NO: 10407 - DNA, 35 bp, Artificial Sequence
  Synthetic oligonucleotide
acacgtgccgacggtcgtgcgtacccggtcccaac

SEQ ID NO: 10408 - DNA, 37 bp, Artificial Sequence
  Synthetic oligonucleotide
acagtccgagagctgggtggtatcatctgacttttga

SEQ ID NO: 10409 - DNA, 38 bp, Artificial Sequence
  Synthetic oligonucleotide
acgcaagccctgactgacagcactgcgcactcctttga

SEQ ID NO: 10410 - DNA, 35 bp, Artificial Sequence
  Synthetic oligonucleotide
actcacaccaccgcgccattgacgtcgaatagagt

SEQ ID NO: 10411 - DNA, 37 bp, Artificial Sequence
  Synthetic oligonucleotide
agcacagtccgagtgatgtcaggtgaagaggcctcga

SEQ ID NO: 10412 - DNA, 37 bp, Artificial Sequence
  Synthetic oligonucleotide
agcgagccagagagcctctaagacctcctcatggaga

SEQ ID NO: 10413 - DNA, 36 bp, Artificial Sequence
  Synthetic oligonucleotide
atgccaaacatgcttagggccgtcccaacttactca

SEQ ID NO: 10414 - DNA, 35 bp, Artificial Sequence
  Synthetic oligonucleotide
atgcgaacgcgaacacaaccgtccctactccatcg

SEQ ID NO: 10415 - DNA, 35 bp, Artificial Sequence
  Synthetic oligonucleotide
gaagccacaccacatgagcaaataagtcgtaacgc

SEQ ID NO: 10416 - DNA, 38 bp, Artificial Sequence
  Synthetic oligonucleotide
gacacagtgcagacagataaccaccgtacaccagttga

SEQ ID NO: 10417 - DNA, 37 bp, Artificial Sequence
  Synthetic oligonucleotide
gacaccgagtagacaggtataggcccatcctcgtgga

SEQ ID NO: 10418 - DNA, 38 bp, Artificial Sequence
  Synthetic oligonucleotide
gacacggatctaactgtccaaaacgatgtctgccatga

SEQ ID NO: 10419 - DNA, 37 bp, Artificial Sequence
  Synthetic oligonucleotide
gacccgcccgaggaacaagagtgctgtagattcacga

SEQ ID NO: 10420 - DNA, 34 bp, Artificial Sequence
  Synthetic oligonucleotide
gacgaccgcaactgtagctctgataaaactcttt

SEQ ID NO: 10421 - DNA, 34 bp, Artificial Sequence
  Synthetic oligonucleotide
gacggacaacgtcacgtgccggctacttctcgct

SEQ ID NO: 10422 - DNA, 35 bp, Artificial Sequence
  Synthetic oligonucleotide
gcaacaccaacggaattcctcgagatctcatggta

SEQ ID NO: 10423 - DNA, 35 bp, Artificial Sequence
  Synthetic oligonucleotide
gcacaacagccgagggatattgaaggtacctgatc

SEQ ID NO: 10424 - DNA, 38 bp, Artificial Sequence
  Synthetic oligonucleotide
gcacatgcacagagacttaatatcgagcaccgcactga

SEQ ID NO: 10425 - DNA, 37 bp, Artificial Sequence
  Synthetic oligonucleotide
gccaacgacaagcataccgtgatgacctgggtaccga

SEQ ID NO: 10426 - DNA, 35 bp, Artificial Sequence
  Synthetic oligonucleotide
gccatgatcaccgtcgacttagggtaccgtcacag

SEQ ID NO: 10427 - DNA, 36 bp, Artificial Sequence
  Synthetic oligonucleotide
gccgcccagcaggaggattggacaggtgaagcacta

SEQ ID NO: 10428 - DNA, 35 bp, Artificial Sequence
  Synthetic oligonucleotide
gccggacgaggaatacggctggcacggacgaacat

SEQ ID NO: 10429 - DNA, 37 bp, Artificial Sequence
  Synthetic oligonucleotide
ggaaccgcacagagaatacatgaacgtcggtcacgga

SEQ ID NO: 10430 - DNA, 36 bp, Artificial Sequence
  Synthetic oligonucleotide
ggacacgctcagtgtccctagtagccacgccccaca

SEQ ID NO: 10431 - DNA, 37 bp, Artificial Sequence
  Synthetic oligonucleotide
gtggggccgaacaaggtgatgatgtgacgggactcga

SEQ ID NO: 10432 - DNA, 36 bp, Artificial Sequence
  Synthetic oligonucleotide
gttgcccaagaagcgaaaggactcgtagtggataca

SEQ ID NO: 10433 - DNA, 35 bp, Artificial Sequence
  Synthetic oligonucleotide
tacatgccacctccgacgggaaaaaggacgctggg

SEQ ID NO: 10434 - DNA, 38 bp, Artificial Sequence
  Synthetic oligonucleotide
taccacatcggctcaaccatgcaggcttggagtaatga

SEQ ID NO: 10435 - DNA, 36 bp, Artificial Sequence
  Synthetic oligonucleotide
tacgccgacacacgccaccaacatattaagacctca

SEQ ID NO: 10436 - DNA, 35 bp, Artificial Sequence
  Synthetic oligonucleotide
tactgaccccgaaacctgccggaccccttccactg

SEQ ID NO: 10437 - DNA, 35 bp, Artificial Sequence
  Synthetic oligonucleotide
tagccacggctcgatcgtacatgcgagaaccgttc

SEQ ID NO: 10438 - DNA, 36 bp, Artificial Sequence
  Synthetic oligonucleotide
tcaaccggcgaacctgcgtacgtttatgcctcacga

SEQ ID NO: 10439 - DNA, 36 bp, Artificial Sequence
  Synthetic oligonucleotide
tcacaactccgaccatggcatgcgatccacgaacga

SEQ ID NO: 10440 - DNA, 35 bp, Artificial Sequence
  Synthetic oligonucleotide
tcagccagacgcaggagctagttacgagaagagtg

SEQ ID NO: 10441 - DNA, 35 bp, Artificial Sequence
  Synthetic oligonucleotide
tgacaaacacggttatgtcgtcaaaaaggtaatac

SEQ ID NO: 10442 - DNA, 36 bp, Artificial Sequence
  Synthetic oligonucleotide
tgacatgctctcgtgtgtcgtccggatctccatgta

SEQ ID NO: 10443 - DNA, 35 bp, Artificial Sequence
  Synthetic oligonucleotide
tgcaaccgaggtggacgcccctatacctggtactg

SEQ ID NO: 10444 - DNA, 37 bp, Artificial Sequence
  Synthetic oligonucleotide
tgccaacccatccacccatcagttccataccattgga

SEQ ID NO: 10445 - DNA, 35 bp, Artificial Sequence
  Synthetic oligonucleotide
tgccacaccagcctgttgagaccctccgtttctga

SEQ ID NO: 10446 - DNA, 36 bp, Artificial Sequence
  Synthetic oligonucleotide
ttgcgacgcaggttcatgttaatttagctaactcca

SEQ ID NO: 10447 - DNA, 37 bp, Artificial Sequence
  Synthetic oligonucleotide
aacacccgaaattgtgaacccgttcgtgctctttgga

SEQ ID NO: 10448 - DNA, 35 bp, Artificial Sequence
  Synthetic oligonucleotide
aacatcacgccccagcgagaattgaggccctgaac

SEQ ID NO: 10449 - DNA, 37 bp, Artificial Sequence
  Synthetic oligonucleotide
acacgccgaaccacaagtcgagtacatgcaatcttga

SEQ ID NO: 10450 - DNA, 35 bp, Artificial Sequence
  Synthetic oligonucleotide
acacggtggccgatgtgtgtgagggcacaaggctt

SEQ ID NO: 10451 - DNA, 38 bp, Artificial Sequence
  Synthetic oligonucleotide
acagcaaccccacgctactcgtatagtcatgtctatga

SEQ ID NO: 10452 - DNA, 35 bp, Artificial Sequence
  Synthetic oligonucleotide
acatcccagcccacatccctaaaccatggcctgaa

SEQ ID NO: 10453 - DNA, 38 bp, Artificial Sequence
  Synthetic oligonucleotide
accccgaccagtgtggctcggccaagtcatgtgggtga

SEQ ID NO: 10454 - DNA, 35 bp, Artificial Sequence
  Synthetic oligonucleotide
actgacacgcgaagtatgaagaacgctagcatagg

SEQ ID NO: 10455 - DNA, 35 bp, Artificial Sequence
  Synthetic oligonucleotide
actgacgaacagttgatgatgcccacatcgtctcg

SEQ ID NO: 10456 - DNA, 37 bp, Artificial Sequence
  Synthetic oligonucleotide
atgtcgcgcacccatcaacccacctgttatctgagga

SEQ ID NO: 10457 - DNA, 37 bp, Artificial Sequence
  Synthetic oligonucleotide
gacacggaagatatatgcctagtgcgaatgtcggtga

SEQ ID NO: 10458 - DNA, 38 bp, Artificial Sequence
  Synthetic oligonucleotide
gacatgcaccgggagtatcggatattgtcccgcgctga

SEQ ID NO: 10459 - DNA, 35 bp, Artificial Sequence
  Synthetic oligonucleotide
gaccaacccaacatcgtgcactggagtaggcaaca

SEQ ID NO: 10460 - DNA, 36 bp, Artificial Sequence
  Synthetic oligonucleotide
gacgacagggcatccgtataccaaccaattaccgta

SEQ ID NO: 10461 - DNA, 37 bp, Artificial Sequence
  Synthetic oligonucleotide
gagagcacagctgtgtcatggaaccagtgttagagga

SEQ ID NO: 10462 - DNA, 35 bp, Artificial Sequence
  Synthetic oligonucleotide
gagccctggggtggggcgaacggttcatcgaggac

SEQ ID NO: 10463 - DNA, 37 bp, Artificial Sequence
  Synthetic oligonucleotide
gatgcagtcggagaagtcattgggaggatggttggga

SEQ ID NO: 10464 - DNA, 35 bp, Artificial Sequence
  Synthetic oligonucleotide
gatgccccagcatctctcaatgcaaacgtgcgaga

SEQ ID NO: 10465 - DNA, 37 bp, Artificial Sequence
  Synthetic oligonucleotide
gcacacgccattggcctagacttccgattgccgcgga

SEQ ID NO: 10466 - DNA, 35 bp, Artificial Sequence
  Synthetic oligonucleotide
gccaaagcatccagaattcggttccgtttgtggcg

SEQ ID NO: 10467 - DNA, 35 bp, Artificial Sequence
  Synthetic oligonucleotide
gcccacgaacagatgaacctcaaccccttcgctcg

SEQ ID NO: 10468 - DNA, 35 bp, Artificial Sequence
  Synthetic oligonucleotide
gccgacagaagcgtactggcagatattgttgaatt

SEQ ID NO: 10469 - DNA, 35 bp, Artificial Sequence
  Synthetic oligonucleotide
gccgacttaatattcaccccgacctctagccaccg

SEQ ID NO: 10470 - DNA, 38 bp, Artificial Sequence
  Synthetic oligonucleotide
gcgacgagcaacgatgctgtcatacgagtgaaaggtga

SEQ ID NO: 10471 - DNA, 36 bp, Artificial Sequence
  Synthetic oligonucleotide
gctgacaccaccgagtgcaatgagcaactaggcgaa

SEQ ID NO: 10472 - DNA, 35 bp, Artificial Sequence
  Synthetic oligonucleotide
gctgacccaacggtaacaccccagtgctaatatca

SEQ ID NO: 10473 - DNA, 37 bp, Artificial Sequence
  Synthetic oligonucleotide
gtcgaacgatcggactggataggtacggtaagagcga

SEQ ID NO: 10474 - DNA, 36 bp, Artificial Sequence
  Synthetic oligonucleotide
gtgcacaggacacgatgtaggttttgcaagacatga

SEQ ID NO: 10475 - DNA, 36 bp, Artificial Sequence
  Synthetic oligonucleotide
gtgcgcaagcactccgataagggtcatgtttccaca

SEQ ID NO: 10476 - DNA, 35 bp, Artificial Sequence
  Synthetic oligonucleotide
gtggagccatcgctatggtgccgacgactgttagt

SEQ ID NO: 10477 - DNA, 35 bp, Artificial Sequence
  Synthetic oligonucleotide
gtggtcgcacccaaatacgatgacgcctttatcgt

SEQ ID NO: 10478 - DNA, 38 bp, Artificial Sequence
  Synthetic oligonucleotide
tacagacgcagctagcatacgtcactccgactccatga

SEQ ID NO: 10479 - DNA, 38 bp, Artificial Sequence
  Synthetic oligonucleotide
tacgctgccgtgccaacgataccgacttatcttaatga

SEQ ID NO: 10480 - DNA, 37 bp, Artificial Sequence
  Synthetic oligonucleotide
tgacaagcaagcaaacaacatgccatccgtggcctga

SEQ ID NO: 10481 - DNA, 36 bp, Artificial Sequence
  Synthetic oligonucleotide
tgatgccaatgcgagagcgtcctgaatctgacaaga

SEQ ID NO: 10482 - DNA, 36 bp, Artificial Sequence
  Synthetic oligonucleotide
tgatgcccaaggtatgctgcatttgaagtattggta

SEQ ID NO: 10483 - DNA, 35 bp, Artificial Sequence
  Synthetic oligonucleotide
tgcacacgtccgacacgaacacgtggtgccccccg

SEQ ID NO: 10484 - DNA, 37 bp, Artificial Sequence
  Synthetic oligonucleotide
tgtgcgatctatgtacttatactgaccccgagagaga

SEQ ID NO: 10485 - DNA, 37 bp, Artificial Sequence
  Synthetic oligonucleotide
tgtgcgccactgactcataagaggggttaatcttaga

SEQ ID NO: 10486 - DNA, 35 bp, Artificial Sequence
  Synthetic oligonucleotide
ttgctgcccgaacgattgagacgacgtgggtaact

SEQ ID NO: 10487 - DNA, 36 bp, Artificial Sequence
  Synthetic oligonucleotide
aacaacccatcagaccgccacagctcgagagagaca

SEQ ID NO: 10488 - DNA, 35 bp, Artificial Sequence
  Synthetic oligonucleotide
aacaaccggtccagcaacgtatcagagtaggtaga

SEQ ID NO: 10489 - DNA, 36 bp, Artificial Sequence
  Synthetic oligonucleotide
aacacgcgcgtgggggtgaaagggaaggggtaggga

SEQ ID NO: 10490 - DNA, 35 bp, Artificial Sequence
  Synthetic oligonucleotide
aacgacacaaagtgacacttgccaggagtgataga

SEQ ID NO: 10491 - DNA, 38 bp, Artificial Sequence
  Synthetic oligonucleotide
acacaaggtgcaagcctggtcttcgtgcgccgggatga

SEQ ID NO: 10492 - DNA, 36 bp, Artificial Sequence
  Synthetic oligonucleotide
acaccccctcccgtgcaacgtaataactgtcggtaa

SEQ ID NO: 10493 - DNA, 36 bp, Artificial Sequence
  Synthetic oligonucleotide
accaccactcgtcacaggagtcgcacttcgcacaca

SEQ ID NO: 10494 - DNA, 35 bp, Artificial Sequence
  Synthetic oligonucleotide
acccccaccggcacgagcgaaaagtcggtgactca

SEQ ID NO: 10495 - DNA, 36 bp, Artificial Sequence
  Synthetic oligonucleotide
acctgcgcaggaagaggttaaggcgagccatacgaa

SEQ ID NO: 10496 - DNA, 35 bp, Artificial Sequence
  Synthetic oligonucleotide
acgaccccgtaaccgacgatctattccgcccattt

SEQ ID NO: 10497 - DNA, 38 bp, Artificial Sequence
  Synthetic oligonucleotide
agccaccgcgaggctgatcacgaacagtgcaaccctga

SEQ ID NO: 10498 - DNA, 37 bp, Artificial Sequence
  Synthetic oligonucleotide
gaccgggaagtgctgctgtgtaactcatggtcaacga

SEQ ID NO: 10499 - DNA, 36 bp, Artificial Sequence
  Synthetic oligonucleotide
gactaccacaacggtgatctggttgacatattaaga

SEQ ID NO: 10500 - DNA, 36 bp, Artificial Sequence
  Synthetic oligonucleotide
gatgcacccgaggaaaagtgaaggataggtatggta

SEQ ID NO: 10501 - DNA, 36 bp, Artificial Sequence
  Synthetic oligonucleotide
gccacaccggatggtatagttccaacgcaccaagaa

SEQ ID NO: 10502 - DNA, 37 bp, Artificial Sequence
  Synthetic oligonucleotide
gccaggtcgtagcgccttggaagactactattcagga

SEQ ID NO: 10503 - DNA, 35 bp, Artificial Sequence
  Synthetic oligonucleotide
gccatgccctactgaaacactgactaagcctattt

SEQ ID NO: 10504 - DNA, 35 bp, Artificial Sequence
  Synthetic oligonucleotide
gcccacgagagttgggcatactattttcgctactg

SEQ ID NO: 10505 - DNA, 38 bp, Artificial Sequence
  Synthetic oligonucleotide
gccgcacgacgctggcatatacacgggacaaagtttga

SEQ ID NO: 10506 - DNA, 35 bp, Artificial Sequence
  Synthetic oligonucleotide
gccgtgaggcggaatctgccaataacggggactta

SEQ ID NO: 10507 - DNA, 38 bp, Artificial Sequence
  Synthetic oligonucleotide
gcgccgaacggcaaacctgattgatctccgagggctga

SEQ ID NO: 10508 - DNA, 35 bp, Artificial Sequence
  Synthetic oligonucleotide
ggtgcccagcatcacgacattcagtatcgatagca

SEQ ID NO: 10509 - DNA, 35 bp, Artificial Sequence
  Synthetic oligonucleotide
gtcaccgaccgcagtgaaccttccagtattgacat

SEQ ID NO: 10510 - DNA, 37 bp, Artificial Sequence
  Synthetic oligonucleotide
gtgacccgcaagtcaagggacgttgagacgcgatgga

SEQ ID NO: 10511 - DNA, 37 bp, Artificial Sequence
  Synthetic oligonucleotide
gtgcccgtcaaggttggacgtgccgctccaagtacga

SEQ ID NO: 10512 - DNA, 35 bp, Artificial Sequence
  Synthetic oligonucleotide
gttggcccacgaatcaaggttcaacgtacccactc

SEQ ID NO: 10513 - DNA, 38 bp, Artificial Sequence
  Synthetic oligonucleotide
tacgcacaatggcccgttatcatatccacaatatctga

SEQ ID NO: 10514 - DNA, 35 bp, Artificial Sequence
  Synthetic oligonucleotide
tcatgccatcttactcgagggctatcgttaccact

SEQ ID NO: 10515 - DNA, 38 bp, Artificial Sequence
  Synthetic oligonucleotide
tgtgccaacgcaacagaagccgcgaggggttatggtga

SEQ ID NO: 10516 - DNA, 36 bp, Artificial Sequence
  Synthetic oligonucleotide
aacacgagcgctggaaaaagtgcgcgttggttataa

SEQ ID NO: 10517 - DNA, 35 bp, Artificial Sequence
  Synthetic oligonucleotide
aacatgcgcgcccagactactcgtgatgcttactt

SEQ ID NO: 10518 - DNA, 36 bp, Artificial Sequence
  Synthetic oligonucleotide
acaaccgccaatggaacgaaactcgacgcgctgaaa

SEQ ID NO: 10519 - DNA, 35 bp, Artificial Sequence
  Synthetic oligonucleotide
acacacgtcgcgaaccaagcatgttcggttgtacc

SEQ ID NO: 10520 - DNA, 38 bp, Artificial Sequence
  Synthetic oligonucleotide
acatcgctgaacctctttatctcgtcgttatctcggga

SEQ ID NO: 10521 - DNA, 37 bp, Artificial Sequence
  Synthetic oligonucleotide
accaccatgagcagatcatcaccgcgacagcaaccga

SEQ ID NO: 10522 - DNA, 36 bp, Artificial Sequence
  Synthetic oligonucleotide
accacgcccgaactgtagagagccggttcgcagata

SEQ ID NO: 10523 - DNA, 35 bp, Artificial Sequence
  Synthetic oligonucleotide
accagtgcgcatgcctttctctcggcttacttcgg

SEQ ID NO: 10524 - DNA, 36 bp, Artificial Sequence
  Synthetic oligonucleotide
agtgagccatagtgctccgttgactactgcaggtca

SEQ ID NO: 10525 - DNA, 35 bp, Artificial Sequence
  Synthetic oligonucleotide
atgcgccgtatgacgaagcctgcaaaaatatacct

SEQ ID NO: 10526 - DNA, 36 bp, Artificial Sequence
  Synthetic oligonucleotide
atgcggacaggttaagaagccgtataggcgtggcga

SEQ ID NO: 10527 - DNA, 35 bp, Artificial Sequence
  Synthetic oligonucleotide
gaaccagaacgcagagagataatgaagggttgatc

SEQ ID NO: 10528 - DNA, 38 bp, Artificial Sequence
  Synthetic oligonucleotide
gacaacggcctattcatcttcgggcgtccagtctgtga

SEQ ID NO: 10529 - DNA, 37 bp, Artificial Sequence
  Synthetic oligonucleotide
gacacccacgcaaatccgggacagagaggagcctaga

SEQ ID NO: 10530 - DNA, 35 bp, Artificial Sequence
  Synthetic oligonucleotide
gacccatgcgactcgacagataagaccagggggtt

SEQ ID NO: 10531 - DNA, 36 bp, Artificial Sequence
  Synthetic oligonucleotide
gaccgccatcggttacgtgcatcagtaagctctcca

SEQ ID NO: 10532 - DNA, 38 bp, Artificial Sequence
  Synthetic oligonucleotide
gacgcaaggccgatacctgatgaaaaactggggtttga

SEQ ID NO: 10533 - DNA, 37 bp, Artificial Sequence
  Synthetic oligonucleotide
gacgcaccacagccgcacacctgacctggctacctga

SEQ ID NO: 10534 - DNA, 38 bp, Artificial Sequence
  Synthetic oligonucleotide
gacgccgatcacacgtcgatgatgaagcgtggctatga

SEQ ID NO: 10535 - DNA, 36 bp, Artificial Sequence
  Synthetic oligonucleotide
gacgcgggcaacgcgtacctaagtgtcctaccgtaa

SEQ ID NO: 10536 - DNA, 35 bp, Artificial Sequence
  Synthetic oligonucleotide
gagacacgaaccggatagtgtggtggaatccctgc

SEQ ID NO: 10537 - DNA, 35 bp, Artificial Sequence
  Synthetic oligonucleotide
gagtcgaagccccgttttgatagtttgcgattgag

SEQ ID NO: 10538 - DNA, 38 bp, Artificial Sequence
  Synthetic oligonucleotide
gcaaaacgcggatcgggatgggcgatgcagtaggttga

SEQ ID NO: 10539 - DNA, 37 bp, Artificial Sequence
  Synthetic oligonucleotide
gcaaacacgtgctgactgatgatgaaacattaaccca

SEQ ID NO: 10540 - DNA, 36 bp, Artificial Sequence
  Synthetic oligonucleotide
gcaaaccgtagccatcctatacgaaggccagtcgaa

SEQ ID NO: 10541 - DNA, 37 bp, Artificial Sequence
  Synthetic oligonucleotide
gcacgaaccccaactactgacccctcctcgaaccgga

SEQ ID NO: 10542 - DNA, 36 bp, Artificial Sequence
  Synthetic oligonucleotide
gccaacgacgcgaggtaggttataactagcccatca

SEQ ID NO: 10543 - DNA, 36 bp, Artificial Sequence
  Synthetic oligonucleotide
gccatgccaggtgtaggaggcttttaccgtggttga

SEQ ID NO: 10544 - DNA, 36 bp, Artificial Sequence
  Synthetic oligonucleotide
gccccgccaacgtcacacttacatccccgttactca

SEQ ID NO: 10545 - DNA, 37 bp, Artificial Sequence
  Synthetic oligonucleotide
gccgactcatcggatgtgactccaacgaattgtcaga

SEQ ID NO: 10546 - DNA, 35 bp, Artificial Sequence
  Synthetic oligonucleotide
gcgagtcgtagcaggctggttatgcctcgtatagg

SEQ ID NO: 10547 - DNA, 36 bp, Artificial Sequence
  Synthetic oligonucleotide
ggaggagccgcatcaacgacaggacagacggtcgga

SEQ ID NO: 10548 - DNA, 36 bp, Artificial Sequence
  Synthetic oligonucleotide
gggacgcagtcaccaggcttacagatagtgcgtaga

SEQ ID NO: 10549 - DNA, 38 bp, Artificial Sequence
  Synthetic oligonucleotide
ggtcaacgaccaattacgaagcaagaactcaccgatga

SEQ ID NO: 10550 - DNA, 37 bp, Artificial Sequence
  Synthetic oligonucleotide
gtgcggtcacggacactactcttcgacatatcggtga

SEQ ID NO: 10551 - DNA, 38 bp, Artificial Sequence
  Synthetic oligonucleotide
gtgctcaacagaccttgtccactcccaggcactactga

SEQ ID NO: 10552 - DNA, 35 bp, Artificial Sequence
  Synthetic oligonucleotide
gttggggaccgaccatcggctatctggtatcaacg

SEQ ID NO: 10553 - DNA, 38 bp, Artificial Sequence
  Synthetic oligonucleotide
taacgcggtagtgtaatgtcggagaagtgggaaagtga

SEQ ID NO: 10554 - DNA, 34 bp, Artificial Sequence
  Synthetic oligonucleotide
tactacgtcccgcctgtcccgtccctcttatctt

SEQ ID NO: 10555 - DNA, 35 bp, Artificial Sequence
  Synthetic oligonucleotide
tcaacgactgcgagccacggactaccatgatgcac

SEQ ID NO: 10556 - DNA, 35 bp, Artificial Sequence
  Synthetic oligonucleotide
tccatcgccaacagccccaccacaacaggattttc

SEQ ID NO: 10557 - DNA, 38 bp, Artificial Sequence
  Synthetic oligonucleotide
tggacaacaggagcagtagaacagatgggattaatcga

SEQ ID NO: 10558 - DNA, 38 bp, Artificial Sequence
  Synthetic oligonucleotide
ttggggcggaagtaactgcgtctctcgacgacagatga

SEQ ID NO: 10559 - DNA, 33 bp, Artificial Sequence
  Synthetic oligonucleotide
aaacaccaaccgcacgatgagttcaacatgaga

SEQ ID NO: 10560 - DNA, 37 bp, Artificial Sequence
  Synthetic oligonucleotide
aacacacggccaactagcatataagggtctatctgga

SEQ ID NO: 10561 - DNA, 35 bp, Artificial Sequence
  Synthetic oligonucleotide
aacatgacacgcaaaggaatgtgaggctactgtca

SEQ ID NO: 10562 - DNA, 35 bp, Artificial Sequence
  Synthetic oligonucleotide
aacccgcgataggtagacaggcgtgtatctctttg

SEQ ID NO: 10563 - DNA, 35 bp, Artificial Sequence
  Synthetic oligonucleotide
aacgcgagagggttacggacgcactgcgctgtacg

SEQ ID NO: 10564 - DNA, 35 bp, Artificial Sequence
  Synthetic oligonucleotide
acaccaagcgcaacggtgttcgttcgaaggaaaaa

SEQ ID NO: 10565 - DNA, 36 bp, Artificial Sequence
  Synthetic oligonucleotide
acaccgccgcgacgagcgtaccacgtcagtactgga

SEQ ID NO: 10566 - DNA, 35 bp, Artificial Sequence
  Synthetic oligonucleotide
acatcagcaacacatccgcgctcactcgacttaat

SEQ ID NO: 10567 - DNA, 37 bp, Artificial Sequence
  Synthetic oligonucleotide
accgaccgagagaggtgaaaaacgacgacagaaaaga

SEQ ID NO: 10568 - DNA, 35 bp, Artificial Sequence
  Synthetic oligonucleotide
acgcgcctggcatgctaatgattcaattgtaattc

SEQ ID NO: 10569 - DNA, 36 bp, Artificial Sequence
  Synthetic oligonucleotide
actgaccccgccggacaatctctgtccgaacgacta

SEQ ID NO: 10570 - DNA, 35 bp, Artificial Sequence
  Synthetic oligonucleotide
attacgcacacgaggagttaacgtctaacgagctg

SEQ ID NO: 10571 - DNA, 38 bp, Artificial Sequence
  Synthetic oligonucleotide
cggccctgtgcgtgtggcgattcagttaatgcagctga

SEQ ID NO: 10572 - DNA, 37 bp, Artificial Sequence
  Synthetic oligonucleotide
gaactgacgcactggaaagaaaacaaccccaccatga

SEQ ID NO: 10573 - DNA, 36 bp, Artificial Sequence
  Synthetic oligonucleotide
gacacagaggcctggaatgttaacggaggatctgca

SEQ ID NO: 10574 - DNA, 37 bp, Artificial Sequence
  Synthetic oligonucleotide
gacaccggcatgtatacagattctgaattttctccga

SEQ ID NO: 10575 - DNA, 37 bp, Artificial Sequence
  Synthetic oligonucleotide
gatgacaagaaggaacaggcgtccgttgatctaagga

SEQ ID NO: 10576 - DNA, 38 bp, Artificial Sequence
  Synthetic oligonucleotide
gatgccggacgcaggctccgtcctgttaatcgtcatga

SEQ ID NO: 10577 - DNA, 37 bp, Artificial Sequence
  Synthetic oligonucleotide
gcaacagggctacagtgcatggcttaagttgggtaga

SEQ ID NO: 10578 - DNA, 37 bp, Artificial Sequence
  Synthetic oligonucleotide
gcacgaaccccaactactgacaccgcctcgaaccgga

SEQ ID NO: 10579 - DNA, 37 bp, Artificial Sequence
  Synthetic oligonucleotide
gccaacaactggatcaactgtcatcgatctctcccga

SEQ ID NO: 10580 - DNA, 37 bp, Artificial Sequence
  Synthetic oligonucleotide
gcccacgtaacgatacgtgtactccaccttaagttga

SEQ ID NO: 10581 - DNA, 37 bp, Artificial Sequence
  Synthetic oligonucleotide
gcccagcacgagcctgtacaaagaccccaattgcgga

SEQ ID NO: 10582 - DNA, 37 bp, Artificial Sequence
  Synthetic oligonucleotide
gccgagctgtagagattaccatcatagcttgcaccga

SEQ ID NO: 10583 - DNA, 36 bp, Artificial Sequence
  Synthetic oligonucleotide
gcgcacaatcataacgatcggtgaatagtccgtcga

SEQ ID NO: 10584 - DNA, 36 bp, Artificial Sequence
  Synthetic oligonucleotide
gctgcacatggcaaaggaccgcatagggctccatga

SEQ ID NO: 10585 - DNA, 36 bp, Artificial Sequence
  Synthetic oligonucleotide
ggggacgcaccagtcgcaataagcgtgctagcaaaa

SEQ ID NO: 10586 - DNA, 35 bp, Artificial Sequence
  Synthetic oligonucleotide
ggtgaccgccacatttgcaccgtatctggcctacg

SEQ ID NO: 10587 - DNA, 35 bp, Artificial Sequence
  Synthetic oligonucleotide
gtacgtgcagtagtccttgcctgcgatatagacag

SEQ ID NO: 10588 - DNA, 38 bp, Artificial Sequence
  Synthetic oligonucleotide
gtgaccgcgtagcgagtatcgtatatatggagttatga

SEQ ID NO: 10589 - DNA, 37 bp, Artificial Sequence
  Synthetic oligonucleotide
gtgacgtcacgcataggagctgcctatactcaacgga

SEQ ID NO: 10590 - DNA, 36 bp, Artificial Sequence
  Synthetic oligonucleotide
tactcacgcgcagacgtgcccatatggctcaaataa

SEQ ID NO: 10591 - DNA, 38 bp, Artificial Sequence
  Synthetic oligonucleotide
tatgcacccccaggacattcgtaagacatgcgtgctga

SEQ ID NO: 10592 - DNA, 36 bp, Artificial Sequence
  Synthetic oligonucleotide
tcaacaccgccatatcgatcatcgtgacttattcca

SEQ ID NO: 10593 - DNA, 36 bp, Artificial Sequence
  Synthetic oligonucleotide
tccaccgtacccgcttggaatgaatgacaattacta

SEQ ID NO: 10594 - DNA, 35 bp, Artificial Sequence
  Synthetic oligonucleotide
tgaacgacgaacaatccatcaaggacgatgccaat

SEQ ID NO: 10595 - DNA, 38 bp, Artificial Sequence
  Synthetic oligonucleotide
tgacaggcctcacagacccccacagacaaactaagtga

SEQ ID NO: 10596 - DNA, 38 bp, Artificial Sequence
  Synthetic oligonucleotide
tgtgaggcgaatctggaaacgggacaaacggtgcttga

SEQ ID NO: 10597 - DNA, 35 bp, Artificial Sequence
  Synthetic oligonucleotide
tgtggccacctgtcgatcgttttgccagaacctcc

SEQ ID NO: 10598 - DNA, 37 bp, Artificial Sequence
  Synthetic oligonucleotide
tgtggcgcagccgcgattatggatgcatcttgatgga

SEQ ID NO: 10599 - DNA, 35 bp, Artificial Sequence
  Synthetic oligonucleotide
ttgccggtcaataatggtactgtatcccacctcgt

SEQ ID NO: 10600 - DNA, 35 bp, Artificial Sequence
  Synthetic oligonucleotide
acagtcgatcgcgcagaagaccgactatgtcacgt

SEQ ID NO: 10601 - DNA, 37 bp, Artificial Sequence
  Synthetic oligonucleotide
accaccgcacattgctggatcgaaagacgtcatgtga

SEQ ID NO: 10602 - DNA, 35 bp, Artificial Sequence
  Synthetic oligonucleotide
accacgtgaggaaggccatgcttacaaatatccca

SEQ ID NO: 10603 - DNA, 35 bp, Artificial Sequence
  Synthetic oligonucleotide
accgctcgaacctgatctacactgaccccgaaagc

SEQ ID NO: 10604 - DNA, 35 bp, Artificial Sequence
  Synthetic oligonucleotide
acgtacagtctgcgtgcactatataccccgatatc

SEQ ID NO: 10605 - DNA, 36 bp, Artificial Sequence
  Synthetic oligonucleotide
agtgccgacgtcatccaggctccaataaacctcaca

SEQ ID NO: 10606 - DNA, 36 bp, Artificial Sequence
  Synthetic oligonucleotide
atggtccgctccaggcttctccttcgcaccaaacaa

SEQ ID NO: 10607 - DNA, 36 bp, Artificial Sequence
  Synthetic oligonucleotide
ccggtaaagcgccctagtaaggatagtagtcgccca

SEQ ID NO: 10608 - DNA, 38 bp, Artificial Sequence
  Synthetic oligonucleotide
gacaacgtgcatcgtcgttcttgttcacgtctctttga

SEQ ID NO: 10609 - DNA, 36 bp, Artificial Sequence
  Synthetic oligonucleotide
gacaccggaggtaacgtgcacgtagtagcattcgta

SEQ ID NO: 10610 - DNA, 37 bp, Artificial Sequence
  Synthetic oligonucleotide
gacacgtgcccagtcgaagtacactcgtcgaatctga

SEQ ID NO: 10611 - DNA, 37 bp, Artificial Sequence
  Synthetic oligonucleotide
gaccaccgcccaaatgttgatcagaggatggacttga

SEQ ID NO: 10612 - DNA, 35 bp, Artificial Sequence
  Synthetic oligonucleotide
gaccacgtccacggcgctaatggccactggggagg

SEQ ID NO: 10613 - DNA, 38 bp, Artificial Sequence
  Synthetic oligonucleotide
gacgacgcagtaggtaaatgtgacggagtttagaatga

SEQ ID NO: 10614 - DNA, 38 bp, Artificial Sequence
  Synthetic oligonucleotide
gacggacggaacagacgtcgcacaaccttgagaactga

SEQ ID NO: 10615 - DNA, 38 bp, Artificial Sequence
  Synthetic oligonucleotide
gagaccgacgcaaagattaaggggacgaacctggatga

SEQ ID NO: 10616 - DNA, 36 bp, Artificial Sequence
  Synthetic oligonucleotide
gagccggaaatcagtatcctaatgcgcaagtggcaa

SEQ ID NO: 10617 - DNA, 38 bp, Artificial Sequence
  Synthetic oligonucleotide
gagtgccacgtcggaagaccaagccgctcctattgtga

SEQ ID NO: 10618 - DNA, 35 bp, Artificial Sequence
  Synthetic oligonucleotide
gataccagccagcccatgatagagatggtgcggtc

SEQ ID NO: 10619 - DNA, 35 bp, Artificial Sequence
  Synthetic oligonucleotide
gatgcagacgctgagacctcgaccccgacgcaata

SEQ ID NO: 10620 - DNA, 35 bp, Artificial Sequence
  Synthetic oligonucleotide
gatgcagtaccgggagatgaaacgggcgacaatgt

SEQ ID NO: 10621 - DNA, 35 bp, Artificial Sequence
  Synthetic oligonucleotide
gcacaacaggtcactctggctgatatttaaaacat

SEQ ID NO: 10622 - DNA, 37 bp, Artificial Sequence
  Synthetic oligonucleotide
gcacaacgccgtacgtgtcaccgagacgtgctcttga

SEQ ID NO: 10623 - DNA, 35 bp, Artificial Sequence
  Synthetic oligonucleotide
gcaccaatcccagatgcatcttccacatcccttac

SEQ ID NO: 10624 - DNA, 38 bp, Artificial Sequence
  Synthetic oligonucleotide
gccacaaagagggccatgagccaggcgacgttacttga

SEQ ID NO: 10625 - DNA, 36 bp, Artificial Sequence
  Synthetic oligonucleotide
gccaccacgcaatgcccatagcttagttttcgcata

SEQ ID NO: 10626 - DNA, 38 bp, Artificial Sequence
  Synthetic oligonucleotide
gccgacagtcagcatgcgtctaacaccatcgtttttga

SEQ ID NO: 10627 - DNA, 35 bp, Artificial Sequence
  Synthetic oligonucleotide
gccgcccacgtgatctatcaagatatgttctgatc

SEQ ID NO: 10628 - DNA, 35 bp, Artificial Sequence
  Synthetic oligonucleotide
gctgaccacaactgagggtgtccgacaggaaggag

SEQ ID NO: 10629 - DNA, 37 bp, Artificial Sequence
  Synthetic oligonucleotide
ggtaccaatcacacgccgcccactacagtattccaga

SEQ ID NO: 10630 - DNA, 35 bp, Artificial Sequence
  Synthetic oligonucleotide
gtccgaacggtcaatcgcttcaggtcactcccaac

SEQ ID NO: 10631 - DNA, 35 bp, Artificial Sequence
  Synthetic oligonucleotide
gtgccgacgccttatctcaatcactcgtatccccg

SEQ ID NO: 10632 - DNA, 35 bp, Artificial Sequence
  Synthetic oligonucleotide
gtgcgagccgccgagaaggttagtacgataggaga

SEQ ID NO: 10633 - DNA, 35 bp, Artificial Sequence
  Synthetic oligonucleotide
gtgggcatcgcacgcacgtaaacaacagacgaacg

SEQ ID NO: 10634 - DNA, 37 bp, Artificial Sequence
  Synthetic oligonucleotide
tacgcaacgggggccatggtcgacacaggactagaga

SEQ ID NO: 10635 - DNA, 35 bp, Artificial Sequence
  Synthetic oligonucleotide
tcccaaacgtagcaacctacgcaatacttggtagg

SEQ ID NO: 10636 - DNA, 36 bp, Artificial Sequence
  Synthetic oligonucleotide
tcgcgactggtgcaaggagcggacgttctaccacga

SEQ ID NO: 10637 - DNA, 35 bp, Artificial Sequence
  Synthetic oligonucleotide
tgatccgcccccatcacgtgcaaggacgatgacgt

SEQ ID NO: 10638 - DNA, 37 bp, Artificial Sequence
  Synthetic oligonucleotide
tgcgaagcagaggctggagcaccgttggttagttaga

SEQ ID NO: 10639 - DNA, 36 bp, Artificial Sequence
  Synthetic oligonucleotide
ttgacgccggtccactgcacattaggatggtagaaa

SEQ ID NO: 10640 - DNA, 37 bp, Artificial Sequence
  Synthetic oligonucleotide
ttgcgcggaacgtgtttacagtcctttggtaggtaga

SEQ ID NO: 10641 - DNA, 36 bp, Artificial Sequence
  Synthetic oligonucleotide
aacgagtgcccagggatatcacgggactaagtatta

SEQ ID NO: 10642 - DNA, 35 bp, Artificial Sequence
  Synthetic oligonucleotide
aacgccactgcacgcaaatctggtgaaactagaaa

SEQ ID NO: 10643 - DNA, 36 bp, Artificial Sequence
  Synthetic oligonucleotide
acaacgaagcgatatgacctcacaggtttaacggaa

SEQ ID NO: 10644 - DNA, 35 bp, Artificial Sequence
  Synthetic oligonucleotide
acaccacacgctcagtactctctgcaacaagcata

SEQ ID NO: 10645 - DNA, 35 bp, Artificial Sequence
  Synthetic oligonucleotide
acaccggatgcgaacacaatagacgttgcgctcac

SEQ ID NO: 10646 - DNA, 36 bp, Artificial Sequence
  Synthetic oligonucleotide
acacgcacacaccgctccgatcgtgcctctccccta

SEQ ID NO: 10647 - DNA, 37 bp, Artificial Sequence
  Synthetic oligonucleotide
acacgccacgtaatgacagtaaaggatcgtcattgga

SEQ ID NO: 10648 - DNA, 36 bp, Artificial Sequence
  Synthetic oligonucleotide
accaaaccccggacgaacacccgtaccagggttgaa

SEQ ID NO: 10649 - DNA, 36 bp, Artificial Sequence
  Synthetic oligonucleotide
accaaagcctaatcctgcgtaatgcatgtcatttca

SEQ ID NO: 10650 - DNA, 35 bp, Artificial Sequence
  Synthetic oligonucleotide
accaaccccggcgcaaaaaccaggggtctccgccc

SEQ ID NO: 10651 - DNA, 38 bp, Artificial Sequence
  Synthetic oligonucleotide
accacaacggctcgacatagtgtcatcgctctaaatga

SEQ ID NO: 10652 - DNA, 36 bp, Artificial Sequence
  Synthetic oligonucleotide
acgatgctgggataaggaatgtcaaggttcaggaga

SEQ ID NO: 10653 - DNA, 37 bp, Artificial Sequence
  Synthetic oligonucleotide
acgcaatgccacaagcaagcaagagtcagaccttaga

SEQ ID NO: 10654 - DNA, 35 bp, Artificial Sequence
  Synthetic oligonucleotide
atcatcgccggataggtgacccaagcgctgccgtc

SEQ ID NO: 10655 - DNA, 38 bp, Artificial Sequence
  Synthetic oligonucleotide
atccgcacggggtgtatacattgtagacggatgcttga

SEQ ID NO: 10656 - DNA, 36 bp, Artificial Sequence
  Synthetic oligonucleotide
atcgccgagcaggggcgagaagtagcctagtagtga

SEQ ID NO: 10657 - DNA, 36 bp, Artificial Sequence
  Synthetic oligonucleotide
atgcgacgtagcatacgtgtttcaacttaaagcttg

SEQ ID NO: 10658 - DNA, 36 bp, Artificial Sequence
  Synthetic oligonucleotide
gacacggtcgcagttggcagacctaactgaatttca

SEQ ID NO: 10659 - DNA, 37 bp, Artificial Sequence
  Synthetic oligonucleotide
gacatcagccacgacgatcatacgtcattctagagga

SEQ ID NO: 10660 - DNA, 38 bp, Artificial Sequence
  Synthetic oligonucleotide
gacccggagaagcctcgactctaagcgttgggcaatga

SEQ ID NO: 10661 - DNA, 35 bp, Artificial Sequence
  Synthetic oligonucleotide
gacgaggcgttattggcgtaacaatatcagttgtg

SEQ ID NO: 10662 - DNA, 38 bp, Artificial Sequence
  Synthetic oligonucleotide
gacgcacatcacgaatgatgaaacgagacttgtgatga

SEQ ID NO: 10663 - DNA, 35 bp, Artificial Sequence
  Synthetic oligonucleotide
gatcgccatcccaatggtcgcatccttatactttg

SEQ ID NO: 10664 - DNA, 38 bp, Artificial Sequence
  Synthetic oligonucleotide
gatgaagcaggcactgaagtccagctttcgattactga

SEQ ID NO: 10665 - DNA, 35 bp, Artificial Sequence
  Synthetic oligonucleotide
gcacatcagacacacatctcgacccttttgaccag

SEQ ID NO: 10666 - DNA, 37 bp, Artificial Sequence
  Synthetic oligonucleotide
gcacccatcacgtggattgtcccgcatgctggctgga

SEQ ID NO: 10667 - DNA, 37 bp, Artificial Sequence
  Synthetic oligonucleotide
gccaagcacacgctttcctgagacaaaatagtgatga

SEQ ID NO: 10668 - DNA, 37 bp, Artificial Sequence
  Synthetic oligonucleotide
gcgcaggtggacgacgaataggacacgcgcgcacgga

SEQ ID NO: 10669 - DNA, 38 bp, Artificial Sequence
  Synthetic oligonucleotide
gtcagggcacgggatatgacaaggtgtgcaagttgtga

SEQ ID NO: 10670 - DNA, 37 bp, Artificial Sequence
  Synthetic oligonucleotide
gtggacagagcctgcatgcctactccgtgtcgagaga

SEQ ID NO: 10671 - DNA, 37 bp, Artificial Sequence
  Synthetic oligonucleotide
tacgagcacggatcagggacacgagcgaggtaactga

SEQ ID NO: 10672 - DNA, 35 bp, Artificial Sequence
  Synthetic oligonucleotide
tacgcggtgaagtgctagcgagagcaacactgtca

SEQ ID NO: 10673 - DNA, 38 bp, Artificial Sequence
  Synthetic oligonucleotide
tagaccgcggatgagctgtaataacgtgcacatcatga

SEQ ID NO: 10674 - DNA, 38 bp, Artificial Sequence
  Synthetic oligonucleotide
tatgtcacgcatcgcaatgtgcggtgagaggctcatga

SEQ ID NO: 10675 - DNA, 38 bp, Artificial Sequence
  Synthetic oligonucleotide
tcacacggaggtatgggggacgcaaactcggactgtga

SEQ ID NO: 10676 - DNA, 37 bp, Artificial Sequence
  Synthetic oligonucleotide
tcccgaagccgcggtttagagtaacgacatggacgga

SEQ ID NO: 10677 - DNA, 35 bp, Artificial Sequence
  Synthetic oligonucleotide
tgaacgtctagacctgaccccgccgaaccgcaaac

SEQ ID NO: 10678 - DNA, 35 bp, Artificial Sequence
  Synthetic oligonucleotide
tgacctgcccgtgagaacatacaccggtatcagcc

SEQ ID NO: 10679 - DNA, 37 bp, Artificial Sequence
  Synthetic oligonucleotide
tgtgccggggtctgtaggaacgttctcaccttcgtga

SEQ ID NO: 10680 - DNA, 35 bp, Artificial Sequence
  Synthetic oligonucleotide
ttgacgcaagatcatggcgagtcgaagatactctt

SEQ ID NO: 10681 - DNA, 35 bp, Artificial Sequence
  Synthetic oligonucleotide
ttgacgccatatccttgcctctgagacaaatcgtg

SEQ ID NO: 10682 - DNA, 38 bp, Artificial Sequence
  Synthetic oligonucleotide
aaacaccgcgccaggtatgggagggctgttgtgactga

SEQ ID NO: 10683 - DNA, 35 bp, Artificial Sequence
  Synthetic oligonucleotide
aacgcacagggggtggcgttacggtaccatccttt

SEQ ID NO: 10684 - DNA, 38 bp, Artificial Sequence
  Synthetic oligonucleotide
aagcacgggacgtgaaaaagtctgtattgggccggtga

SEQ ID NO: 10685 - DNA, 35 bp, Artificial Sequence
  Synthetic oligonucleotide
acacacccctgatgcacttgcagcacacttttgca

SEQ ID NO: 10686 - DNA, 35 bp, Artificial Sequence
  Synthetic oligonucleotide
acagacgcagtgcatgcatcggagggtccattgga

SEQ ID NO: 10687 - DNA, 35 bp, Artificial Sequence
  Synthetic oligonucleotide
acccgcacgactgccctttaattacgcttactaca

SEQ ID NO: 10688 - DNA, 38 bp, Artificial Sequence
  Synthetic oligonucleotide
acctagggggcgcaaactggtcacgacaacagaaatga

SEQ ID NO: 10689 - DNA, 36 bp, Artificial Sequence
  Synthetic oligonucleotide
actgacgcaaagcagcaagtctcaacgctcagagta

SEQ ID NO: 10690 - DNA, 35 bp, Artificial Sequence
  Synthetic oligonucleotide
agacacagacaacgagcagatacgcgtttaggagg

SEQ ID NO: 10691 - DNA, 36 bp, Artificial Sequence
  Synthetic oligonucleotide
aggaaccacacagggatgttcaaaggactgtaagca

SEQ ID NO: 10692 - DNA, 36 bp, Artificial Sequence
  Synthetic oligonucleotide
atccgtcaccaagcaaacgtttgtcctgtggttgga

SEQ ID NO: 10693 - DNA, 38 bp, Artificial Sequence
  Synthetic oligonucleotide
gaccaaagcctccaatagcggtctgccatgttacttga

SEQ ID NO: 10694 - DNA, 37 bp, Artificial Sequence
  Synthetic oligonucleotide
gaccaggtaggcgttaacaccaaatgggaatggtgga

SEQ ID NO: 10695 - DNA, 36 bp, Artificial Sequence
  Synthetic oligonucleotide
gaccccgagcaccgttcatcgggaccttagtataaa

SEQ ID NO: 10696 - DNA, 35 bp, Artificial Sequence
  Synthetic oligonucleotide
gaccgacgccggaaggcaaaatgctggtgctcaca

SEQ ID NO: 10697 - DNA, 38 bp, Artificial Sequence
  Synthetic oligonucleotide
gaccgcaaaggtatcgcttgctggtcttccacggatga

SEQ ID NO: 10698 - DNA, 38 bp, Artificial Sequence
  Synthetic oligonucleotide
gacgagccaggggttcgataattgccataggagcgtga

SEQ ID NO: 10699 - DNA, 36 bp, Artificial Sequence
  Synthetic oligonucleotide
gacgcgggcagacgcgcaagacccaccattccccta

SEQ ID NO: 10700 - DNA, 35 bp, Artificial Sequence
  Synthetic oligonucleotide
gactggcaacggacgttccttcttacacccacaca

SEQ ID NO: 10701 - DNA, 35 bp, Artificial Sequence
  Synthetic oligonucleotide
gagctggtacacatcgtaatcgatcagtctttgga

SEQ ID NO: 10702 - DNA, 38 bp, Artificial Sequence
  Synthetic oligonucleotide
gagtcggagacaggaaggagacagtgaggccacattga

SEQ ID NO: 10703 - DNA, 37 bp, Artificial Sequence
  Synthetic oligonucleotide
gatgacctcgcgctcaattcctggagtcccgtactga

SEQ ID NO: 10704 - DNA, 37 bp, Artificial Sequence
  Synthetic oligonucleotide
gatgcccagcagggacacaaacgatccgcctacttga

SEQ ID NO: 10705 - DNA, 38 bp, Artificial Sequence
  Synthetic oligonucleotide
gatgcgccatactcagactgggttaattgaagggttga

SEQ ID NO: 10706 - DNA, 36 bp, Artificial Sequence
  Synthetic oligonucleotide
gatggggcgggaacggctgtcaggatggtaggacca

SEQ ID NO: 10707 - DNA, 38 bp, Artificial Sequence
  Synthetic oligonucleotide
gcacgcaggcagaatgcagtctactaaacgcgatttga

SEQ ID NO: 10708 - DNA, 38 bp, Artificial Sequence
  Synthetic oligonucleotide
gccaatgggacggataagtacaatcgcggtagtcatga

SEQ ID NO: 10709 - DNA, 38 bp, Artificial Sequence
  Synthetic oligonucleotide
gccgagcattgggaggccatcggggactcattgtatga

SEQ ID NO: 10710 - DNA, 35 bp, Artificial Sequence
  Synthetic oligonucleotide
gccgccgaactaaccgcctcgcaagcaatggccgc

SEQ ID NO: 10711 - DNA, 37 bp, Artificial Sequence
  Synthetic oligonucleotide
gctgacggcgccaatacgacatccaccatatagagga

SEQ ID NO: 10712 - DNA, 35 bp, Artificial Sequence
  Synthetic oligonucleotide
ggacacagtcgtcacctcaaaccttgcgccaagat

SEQ ID NO: 10713 - DNA, 35 bp, Artificial Sequence
  Synthetic oligonucleotide
gtccgccgccgccgcatagtgagtccagcaagatt

SEQ ID NO: 10714 - DNA, 35 bp, Artificial Sequence
  Synthetic oligonucleotide
gtcgagtcgcaggaatgcgttttttatttggagga

SEQ ID NO: 10715 - DNA, 35 bp, Artificial Sequence
  Synthetic oligonucleotide
tacgcaccggcgaaatcgtaaatcagacacccact

SEQ ID NO: 10716 - DNA, 38 bp, Artificial Sequence
  Synthetic oligonucleotide
tacgccgactcgtgcgacactcccgttgtcacgattga

SEQ ID NO: 10717 - DNA, 36 bp, Artificial Sequence
  Synthetic oligonucleotide
tcaaagccgcagtgagtgcaagttcgaacgtttaca

SEQ ID NO: 10718 - DNA, 38 bp, Artificial Sequence
  Synthetic oligonucleotide
tccggaggagcggtcaggctctccaggaacgtacttga

SEQ ID NO: 10719 - DNA, 36 bp, Artificial Sequence
  Synthetic oligonucleotide
tgcaacccaccttgctaacgtcgcctgccaagtcca

SEQ ID NO: 10720 - DNA, 35 bp, Artificial Sequence
  Synthetic oligonucleotide
tgcgtacctacaaccatatgtgtccggccattttg

SEQ ID NO: 10721 - DNA, 38 bp, Artificial Sequence
  Synthetic oligonucleotide
ttcatcgccggaaggtaggtccagggactgccgagtga

SEQ ID NO: 10722 - DNA, 35 bp, Artificial Sequence
  Synthetic oligonucleotide
ttgacgcccatcccacgcgctcattcatgacgtac

SEQ ID NO: 10723 - DNA, 37 bp, Artificial Sequence
  Synthetic oligonucleotide
aacacagggcagtcctctcacctagtgacagctctga

SEQ ID NO: 10724 - DNA, 36 bp, Artificial Sequence
  Synthetic oligonucleotide
aacgcacacaaggcgaatacggacgtgcacatgcta

SEQ ID NO: 10725 - DNA, 35 bp, Artificial Sequence
  Synthetic oligonucleotide
aacgcagtccaagcgcaccctttagcaacacgttc

SEQ ID NO: 10726 - DNA, 35 bp, Artificial Sequence
  Synthetic oligonucleotide
acaccacagagcgccctacgcagtccatccagacc

SEQ ID NO: 10727 - DNA, 35 bp, Artificial Sequence
  Synthetic oligonucleotide
acacgagagagtgactactggaacgactggggtcg

SEQ ID NO: 10728 - DNA, 35 bp, Artificial Sequence
  Synthetic oligonucleotide
acacgcaccggccagtctagtgcacggttgtggtc

SEQ ID NO: 10729 - DNA, 38 bp, Artificial Sequence
  Synthetic oligonucleotide
acagcacgcatacacaagaactacgtggtctagcttga

SEQ ID NO: 10730 - DNA, 36 bp, Artificial Sequence
  Synthetic oligonucleotide
acccaggccagagagcgataatgagcggattacgaa

SEQ ID NO: 10731 - DNA, 38 bp, Artificial Sequence
  Synthetic oligonucleotide
acctgcacagaatcgatgagcacgcggttgttttgtga

SEQ ID NO: 10732 - DNA, 35 bp, Artificial Sequence
  Synthetic oligonucleotide
acgcacacacagcaacttagtcgtcagtccattgt

SEQ ID NO: 10733 - DNA, 35 bp, Artificial Sequence
  Synthetic oligonucleotide
agtgccagaaacaccatagagataggcttggtagt

SEQ ID NO: 10734 - DNA, 37 bp, Artificial Sequence
  Synthetic oligonucleotide
atcgccccacagaagtgaagtacagctccgggctcga

SEQ ID NO: 10735 - DNA, 36 bp, Artificial Sequence
  Synthetic oligonucleotide
atcgtgcgaagacccccagacattagactatactga

SEQ ID NO: 10736 - DNA, 38 bp, Artificial Sequence
  Synthetic oligonucleotide
gaaacacagtgcctcacatacggtcaatcgcgggttga

SEQ ID NO: 10737 - DNA, 35 bp, Artificial Sequence
  Synthetic oligonucleotide
gaaccgcaaagggattgatatagtagaacacttca

SEQ ID NO: 10738 - DNA, 34 bp, Artificial Sequence
  Synthetic oligonucleotide
gacaacgcagtaagcgtgaggagattgagcacaa

SEQ ID NO: 10739 - DNA, 35 bp, Artificial Sequence
  Synthetic oligonucleotide
gacacgagcaaaggacgcaacagttacgaaagggt

SEQ ID NO: 10740 - DNA, 35 bp, Artificial Sequence
  Synthetic oligonucleotide
gacccggtaagtggtcatactccccacacgccttt

SEQ ID NO: 10741 - DNA, 37 bp, Artificial Sequence
  Synthetic oligonucleotide
gacgacagtcgcagtcgttaggtatgaacctgtagga

SEQ ID NO: 10742 - DNA, 35 bp, Artificial Sequence
  Synthetic oligonucleotide
gacgcacgagctgtgtacaccagttcttgttagac

SEQ ID NO: 10743 - DNA, 36 bp, Artificial Sequence
  Synthetic oligonucleotide
gacgccttcaagctcaatctactgaaccatccagga

SEQ ID NO: 10744 - DNA, 37 bp, Artificial Sequence
  Synthetic oligonucleotide
gcaaacgcagataggcgaaagtgtcatccacctggga

SEQ ID NO: 10745 - DNA, 38 bp, Artificial Sequence
  Synthetic oligonucleotide
gcacaaccacatatctgaacgacgagtttcgcgtatga

SEQ ID NO: 10746 - DNA, 37 bp, Artificial Sequence
  Synthetic oligonucleotide
gcacacaatcaaccacacgacacatgcgctaactcga

SEQ ID NO: 10747 - DNA, 35 bp, Artificial Sequence
  Synthetic oligonucleotide
gcaccggggtccgtgtgtgttgggatggatttagt

SEQ ID NO: 10748 - DNA, 35 bp, Artificial Sequence
  Synthetic oligonucleotide
gccaacgtaggtgacacaatagacttgggaaagga

SEQ ID NO: 10749 - DNA, 35 bp, Artificial Sequence
  Synthetic oligonucleotide
gccacgcaccgttccttattttaaagtggtcacgt

SEQ ID NO: 10750 - DNA, 38 bp, Artificial Sequence
  Synthetic oligonucleotide
gccatacgtcggggccttttattctaaccagatgttga

SEQ ID NO: 10751 - DNA, 36 bp, Artificial Sequence
  Synthetic oligonucleotide
gccccgcgcaggggactaacaagcagttccatagga

SEQ ID NO: 10752 - DNA, 37 bp, Artificial Sequence
  Synthetic oligonucleotide
ggacactacatgcatagcgaccgccactagtccgcga

SEQ ID NO: 10753 - DNA, 36 bp, Artificial Sequence
  Synthetic oligonucleotide
ggaccgcaagggtagtccacggaccacgtggataaa

SEQ ID NO: 10754 - DNA, 37 bp, Artificial Sequence
  Synthetic oligonucleotide
gtcgcccacccgatacaaattatggcctaccctagga

SEQ ID NO: 10755 - DNA, 36 bp, Artificial Sequence
  Synthetic oligonucleotide
gtgaaacgcagtagtgggtacatcacctcacctgga

SEQ ID NO: 10756 - DNA, 38 bp, Artificial Sequence
  Synthetic oligonucleotide
gtgacgccacgtagaaagattcagtccctggtggttga

SEQ ID NO: 10757 - DNA, 37 bp, Artificial Sequence
  Synthetic oligonucleotide
tacgcgctggtaggtaaaagtcccggcgtcttacgga

SEQ ID NO: 10758 - DNA, 35 bp, Artificial Sequence
  Synthetic oligonucleotide
tacgcggatcggtggttaggtcgcgtttaattgga

SEQ ID NO: 10759 - DNA, 35 bp, Artificial Sequence
  Synthetic oligonucleotide
tagcccaaccacactgtactgagtacacgctccca

SEQ ID NO: 10760 - DNA, 37 bp, Artificial Sequence
  Synthetic oligonucleotide
taggacccggagatggtaagtatcgaaatacgtagga

SEQ ID NO: 10761 - DNA, 36 bp, Artificial Sequence
  Synthetic oligonucleotide
tatgacgcacgtgctgttcttagactgaacttggta

SEQ ID NO: 10762 - DNA, 37 bp, Artificial Sequence
  Synthetic oligonucleotide
tcaacgatcagccgcatgcatcgaaggttaccccgga

SEQ ID NO: 10763 - DNA, 37 bp, Artificial Sequence
  Synthetic oligonucleotide
tcacgccctcggattaacatgtctttttctatattga

SEQ ID NO: 10764 - DNA, 37 bp, Artificial Sequence
  Synthetic oligonucleotide
tcatggctggccgggtacttgaggctgatacgttgga

SEQ ID NO: 10765 - DNA, 38 bp, Artificial Sequence
  Synthetic oligonucleotide
tccaccgccacggatcttacagctacatcattggttga

SEQ ID NO: 10766 - DNA, 35 bp, Artificial Sequence
  Synthetic oligonucleotide
tccatcatgcgacatgccgagtctaggaaggtttg

SEQ ID NO: 10767 - DNA, 35 bp, Artificial Sequence
  Synthetic oligonucleotide
tgaccacatgcaattgaggtcttgaccgggtttgg

SEQ ID NO: 10768 - DNA, 36 bp, Artificial Sequence
  Synthetic oligonucleotide
tgacgcaagatgacgagaaaggccgtgttttcgtga

SEQ ID NO: 10769 - DNA, 36 bp, Artificial Sequence
  Synthetic oligonucleotide
tgccaaccccgaacacaaccatccagttggctccaa

SEQ ID NO: 10770 - DNA, 37 bp, Artificial Sequence
  Synthetic oligonucleotide
tgcgcaatggtgacgtagaggtcacaacaatatgcga

SEQ ID NO: 10771 - DNA, 37 bp, Artificial Sequence
  Synthetic oligonucleotide
tgtgaagcacagcgaaagttatcaacccgtgaacaca

SEQ ID NO: 10772 - DNA, 36 bp, Artificial Sequence
  Synthetic oligonucleotide
ttagccaccaggcgctctcgtcacggtccgaatgga

SEQ ID NO: 10773 - DNA, 35 bp, Artificial Sequence
  Synthetic oligonucleotide
ttgccgccccttactgtttcgtatacacatccaag

SEQ ID NO: 10774 - DNA, 36 bp, Artificial Sequence
  Synthetic oligonucleotide
acacaccgcgcataacctatttgagactatcactca

SEQ ID NO: 10775 - DNA, 38 bp, Artificial Sequence
  Synthetic oligonucleotide
acacgcagagggtctcaaacgcacagagacactactga

SEQ ID NO: 10776 - DNA, 37 bp, Artificial Sequence
  Synthetic oligonucleotide
acacgcgggtatgttaaagttgcctatctatcgtgga

SEQ ID NO: 10777 - DNA, 35 bp, Artificial Sequence
  Synthetic oligonucleotide
accaccgtgcgcttagtggggtaggatcatctctt

SEQ ID NO: 10778 - DNA, 35 bp, Artificial Sequence
  Synthetic oligonucleotide
acccaagccgggagttatacacgggactaaagaga

SEQ ID NO: 10779 - DNA, 35 bp, Artificial Sequence
  Synthetic oligonucleotide
accccgccgaaacacacgtgatgccctacgattcc

SEQ ID NO: 10780 - DNA, 36 bp, Artificial Sequence
  Synthetic oligonucleotide
accgacacagccattcgcttacccgaggcatgggaa

SEQ ID NO: 10781 - DNA, 35 bp, Artificial Sequence
  Synthetic oligonucleotide
accgacccccgcacgctccctgccccgcttaatcg

SEQ ID NO: 10782 - DNA, 37 bp, Artificial Sequence
  Synthetic oligonucleotide
acctgcacagggacatgcgcgaaactgttctcgtaga

SEQ ID NO: 10783 - DNA, 35 bp, Artificial Sequence
  Synthetic oligonucleotide
acgaacacgcagaagtcaaagccctgcaatgatgt

SEQ ID NO: 10784 - DNA, 38 bp, Artificial Sequence
  Synthetic oligonucleotide
atgcactaccgactgtgaacaccgatgaagtcggatga

SEQ ID NO: 10785 - DNA, 38 bp, Artificial Sequence
  Synthetic oligonucleotide
gaacgcgatgcggtggacgaagaaacagttcatattga

SEQ ID NO: 10786 - DNA, 35 bp, Artificial Sequence
  Synthetic oligonucleotide
gaatccggcgagggaccgtaacgtctgcaggaatg

SEQ ID NO: 10787 - DNA, 36 bp, Artificial Sequence
  Synthetic oligonucleotide
gacaaccagcattttatggacacaccctcaactaga

SEQ ID NO: 10788 - DNA, 38 bp, Artificial Sequence
  Synthetic oligonucleotide
gaccccactgaccccgccaacctgcgttacctttgtga

SEQ ID NO: 10789 - DNA, 37 bp, Artificial Sequence
  Synthetic oligonucleotide
gaccgcattcagtcgtaatcacgtagtaccgttcgga

SEQ ID NO: 10790 - DNA, 36 bp, Artificial Sequence
  Synthetic oligonucleotide
gacgaaaccgcgctgcaaaaggatgcagataacaaa

SEQ ID NO: 10791 - DNA, 38 bp, Artificial Sequence
  Synthetic oligonucleotide
gacgacaaggcacgtacgtatgaggaccgttggggtga

SEQ ID NO: 10792 - DNA, 38 bp, Artificial Sequence
  Synthetic oligonucleotide
gacgccacacaggtatgcagggggagccatgcctctga

SEQ ID NO: 10793 - DNA, 37 bp, Artificial Sequence
  Synthetic oligonucleotide
gagggtgtgcgcgtacaagggcaattccgcttatcga

SEQ ID NO: 10794 - DNA, 38 bp, Artificial Sequence
  Synthetic oligonucleotide
gatgcggacgccaaagaagttgaggagaaacgagctga

SEQ ID NO: 10795 - DNA, 36 bp, Artificial Sequence
  Synthetic oligonucleotide
gcacggaacgcgtatcttagtgtgtacaccctcgaa

SEQ ID NO: 10796 - DNA, 35 bp, Artificial Sequence
  Synthetic oligonucleotide
gccaaccgacagatcccttacagacgattctgtgg

SEQ ID NO: 10797 - DNA, 35 bp, Artificial Sequence
  Synthetic oligonucleotide
gccacaacgcatagcctgagatgtacgtggcctac

SEQ ID NO: 10798 - DNA, 38 bp, Artificial Sequence
  Synthetic oligonucleotide
gcccaagctgaaagcgtgcgaacctatcgatataatga

SEQ ID NO: 10799 - DNA, 36 bp, Artificial Sequence
  Synthetic oligonucleotide
gcgaagacgccctaaacccccgggtagacaggtgaa

SEQ ID NO: 10800 - DNA, 35 bp, Artificial Sequence
  Synthetic oligonucleotide
ggacgctggtccgggcactacagagcacgttcatt

SEQ ID NO: 10801 - DNA, 38 bp, Artificial Sequence
  Synthetic oligonucleotide
ggcaaatgttgcggatgtttgtgcggtagagaaaatga

SEQ ID NO: 10802 - DNA, 36 bp, Artificial Sequence
  Synthetic oligonucleotide
gtacgtgccggagctctttctgaaatcgagtgtgaa

SEQ ID NO: 10803 - DNA, 36 bp, Artificial Sequence
  Synthetic oligonucleotide
gtcaaccggaagtatatggtgtgacaagggctccta

SEQ ID NO: 10804 - DNA, 35 bp, Artificial Sequence
  Synthetic oligonucleotide
gtcacaaccggtagagctcagcgacacgacgaagc

SEQ ID NO: 10805 - DNA, 35 bp, Artificial Sequence
  Synthetic oligonucleotide
gtcacacgcgggctaaccgagttcgaacatgacct

SEQ ID NO: 10806 - DNA, 37 bp, Artificial Sequence
  Synthetic oligonucleotide
gtgacgacccacacgtgtaacactgaaaggcatacga

SEQ ID NO: 10807 - DNA, 37 bp, Artificial Sequence
  Synthetic oligonucleotide
gtgcgcccatcggagaatagggggaccagtattatga

SEQ ID NO: 10808 - DNA, 35 bp, Artificial Sequence
  Synthetic oligonucleotide
tacactgcctgagcggtcgatcttaacccctagtg

SEQ ID NO: 10809 - DNA, 38 bp, Artificial Sequence
  Synthetic oligonucleotide
tacgcagacaccggttgcgtacgttaccagtttcctga

SEQ ID NO: 10810 - DNA, 36 bp, Artificial Sequence
  Synthetic oligonucleotide
tcacgcccgcaacggttttgggtgtgaaccatgcta

SEQ ID NO: 10811 - DNA, 38 bp, Artificial Sequence
  Synthetic oligonucleotide
tccgaaactcacgcgttcaaccccccagtcgtgcctga

SEQ ID NO: 10812 - DNA, 36 bp, Artificial Sequence
  Synthetic oligonucleotide
tgcgaagcaaacgtaacgacccgaccgcaacgcgca

SEQ ID NO: 10813 - DNA, 36 bp, Artificial Sequence
  Synthetic oligonucleotide
tgtcgtgagccgctctggacatacgttatgttgcca

SEQ ID NO: 10814 - DNA, 38 bp, Artificial Sequence
  Synthetic oligonucleotide
ttgccaacgcccacccgagacatgcaagtttgatatga

SEQ ID NO: 10815 - DNA, 36 bp, Artificial Sequence
  Synthetic oligonucleotide
acacgcagtcggaagggtgaaagggtggagtgggaa

SEQ ID NO: 10816 - DNA, 36 bp, Artificial Sequence
  Synthetic oligonucleotide
accaccgacattgctacagagcccaacgcacactaa

SEQ ID NO: 10817 - DNA, 35 bp, Artificial Sequence
  Synthetic oligonucleotide
accgactccactatcgcctaccgaccccgtgccac

SEQ ID NO: 10818 - DNA, 36 bp, Artificial Sequence
  Synthetic oligonucleotide
acctcaacaacagtcatgcgtacacaccgtttcgaa

SEQ ID NO: 10819 - DNA, 36 bp, Artificial Sequence
  Synthetic oligonucleotide
acctggcaccatacctcggtcctaaactatagtcga

SEQ ID NO: 10820 - DNA, 35 bp, Artificial Sequence
  Synthetic oligonucleotide
acgaggcccagtacgtaatccctgctattccatct

SEQ ID NO: 10821 - DNA, 37 bp, Artificial Sequence
  Synthetic oligonucleotide
acgcaactgcaaatgtataccgtactcgttcttgcga

SEQ ID NO: 10822 - DNA, 36 bp, Artificial Sequence
  Synthetic oligonucleotide
actaacgctaccacacacaaactacagttcttacga

SEQ ID NO: 10823 - DNA, 36 bp, Artificial Sequence
  Synthetic oligonucleotide
actgacgacgtaagctggaacctaaagagcactcgg

SEQ ID NO: 10824 - DNA, 35 bp, Artificial Sequence
  Synthetic oligonucleotide
actgacgaggcaaaagttgaaacggtaagtgtagc

SEQ ID NO: 10825 - DNA, 38 bp, Artificial Sequence
  Synthetic oligonucleotide
actgacggtggtcatgagcgctacaactgttcggatga

SEQ ID NO: 10826 - DNA, 35 bp, Artificial Sequence
  Synthetic oligonucleotide
actgcagggcaaacactcgtcctagatggtcgtat

SEQ ID NO: 10827 - DNA, 38 bp, Artificial Sequence
  Synthetic oligonucleotide
aggacgtgcacgaggtacgtgttggccaacgttggtga

SEQ ID NO: 10828 - DNA, 36 bp, Artificial Sequence
  Synthetic oligonucleotide
agtcacgcctcccagaatcctcaaagagcacatcga

SEQ ID NO: 10829 - DNA, 35 bp, Artificial Sequence
  Synthetic oligonucleotide
agtgcccaaggaacaaggactgcaattggtgacct

SEQ ID NO: 10830 - DNA, 38 bp, Artificial Sequence
  Synthetic oligonucleotide
agtggccgcatgtgaaggaggcaccccgatatgagtga

SEQ ID NO: 10831 - DNA, 35 bp, Artificial Sequence
  Synthetic oligonucleotide
atgacacgacgcatgtaaggatttaagtgatcggt

SEQ ID NO: 10832 - DNA, 38 bp, Artificial Sequence
  Synthetic oligonucleotide
gaaaacgccaccacacccacacgtatggaagtgcttga

SEQ ID NO: 10833 - DNA, 37 bp, Artificial Sequence
  Synthetic oligonucleotide
gaaccgagccgcccttatcgtagcgaaacgcctacga

SEQ ID NO: 10834 - DNA, 37 bp, Artificial Sequence
  Synthetic oligonucleotide
gacaggagacccggagtacggtcctgtcataggtgga

SEQ ID NO: 10835 - DNA, 36 bp, Artificial Sequence
  Synthetic oligonucleotide
gaccacgaggtcgtaggtactgttggcatcttgtat

SEQ ID NO: 10836 - DNA, 35 bp, Artificial Sequence
  Synthetic oligonucleotide
gaccagcaagccgagggtcgtcgagaatcgtagga

SEQ ID NO: 10837 - DNA, 38 bp, Artificial Sequence
  Synthetic oligonucleotide
gacgactccgtccatccatagtataggaacgtccgtga

SEQ ID NO: 10838 - DNA, 36 bp, Artificial Sequence
  Synthetic oligonucleotide
gacgaggtggatcaatgctggtcacgaaactcccaa

SEQ ID NO: 10839 - DNA, 36 bp, Artificial Sequence
  Synthetic oligonucleotide
gagacgcaggaggtagacagtcaagtgtcacgacta

SEQ ID NO: 10840 - DNA, 35 bp, Artificial Sequence
  Synthetic oligonucleotide
gagccggtcgagtggctcacaagggtacgcaatca

SEQ ID NO: 10841 - DNA, 36 bp, Artificial Sequence
  Synthetic oligonucleotide
gagctcaccccagtgagactcatactcgccctagta

SEQ ID NO: 10842 - DNA, 37 bp, Artificial Sequence
  Synthetic oligonucleotide
gcaaacgccaaaggactaggttcaggtatatcaggga

SEQ ID NO: 10843 - DNA, 35 bp, Artificial Sequence
  Synthetic oligonucleotide
gcaacagtgcgcatgacctcgaagtggtggaggtg

SEQ ID NO: 10844 - DNA, 38 bp, Artificial Sequence
  Synthetic oligonucleotide
gcaccacagggccactagccgatccatattacacatga

SEQ ID NO: 10845 - DNA, 35 bp, Artificial Sequence
  Synthetic oligonucleotide
gcacgagagtgcttataactaccttcatacatgcg

SEQ ID NO: 10846 - DNA, 35 bp, Artificial Sequence
  Synthetic oligonucleotide
gcacgcatgcaacatgacccatttacgtaacatac

SEQ ID NO: 10847 - DNA, 37 bp, Artificial Sequence
  Synthetic oligonucleotide
gcagacgcgcgtaatccgtcgcaacggtgatcgtgga

SEQ ID NO: 10848 - DNA, 35 bp, Artificial Sequence
  Synthetic oligonucleotide
gcgaagagtcggctgtcatctcatcactcatcttt

SEQ ID NO: 10849 - DNA, 37 bp, Artificial Sequence
  Synthetic oligonucleotide
ggaacacggccagtaacatatgcccgtttctatcgga

SEQ ID NO: 10850 - DNA, 38 bp, Artificial Sequence
  Synthetic oligonucleotide
ggtaaggtgcaggtgaaaaatgtagtcgaatagtgtga

SEQ ID NO: 10851 - DNA, 35 bp, Artificial Sequence
  Synthetic oligonucleotide
gtgcacacgcagaggcgcacctacacgtgtcaaca

SEQ ID NO: 10852 - DNA, 36 bp, Artificial Sequence
  Synthetic oligonucleotide
gtgccagaacgttcgtgaacacgtgtgcgtgggtaa

SEQ ID NO: 10853 - DNA, 36 bp, Artificial Sequence
  Synthetic oligonucleotide
gtggggtccgtcgcggcaccacacgttgacaatgca

SEQ ID NO: 10854 - DNA, 37 bp, Artificial Sequence
  Synthetic oligonucleotide
tacacacagtcgagttgagggccctacaccttaatga

SEQ ID NO: 10855 - DNA, 36 bp, Artificial Sequence
  Synthetic oligonucleotide
tacgcaccccccacgggttcgagaggtgctactcga

SEQ ID NO: 10856 - DNA, 35 bp, Artificial Sequence
  Synthetic oligonucleotide
tacgcccaagtattcgtccgctgtcgttgcgatag

SEQ ID NO: 10857 - DNA, 35 bp, Artificial Sequence
  Synthetic oligonucleotide
tcaacgcaacaccgatgaaatagggaggccagtgg

SEQ ID NO: 10858 - DNA, 35 bp, Artificial Sequence
  Synthetic oligonucleotide
tcacgtacagaggcaagggccactcccgtcctccc

SEQ ID NO: 10859 - DNA, 35 bp, Artificial Sequence
  Synthetic oligonucleotide
tcatgctgccactccacttgttgctggattagact

SEQ ID NO: 10860 - DNA, 37 bp, Artificial Sequence
  Synthetic oligonucleotide
tcgagacccatcgcacagttcggtattttgaagacga

SEQ ID NO: 10861 - DNA, 36 bp, Artificial Sequence
  Synthetic oligonucleotide
tgcacacagcatcggcaacacctgggactcctttga

SEQ ID NO: 10862 - DNA, 35 bp, Artificial Sequence
  Synthetic oligonucleotide
tggacaaccccgcacgctccaacaggcagtccaaa

SEQ ID NO: 10863 - DNA, 38 bp, Artificial Sequence
  Synthetic oligonucleotide
tggagctgggactgcccgttttgtgttaagcgttctga

SEQ ID NO: 10864 - DNA, 35 bp, Artificial Sequence
  Synthetic oligonucleotide
ttcgaactgccatctgccgtctaccaaccactcgc

SEQ ID NO: 10865 - DNA, 37 bp, Artificial Sequence
  Synthetic oligonucleotide
aacaaccacagtgataccggaccaaaacaaggctaga

SEQ ID NO: 10866 - DNA, 35 bp, Artificial Sequence
  Synthetic oligonucleotide
aacacgcactcgactgagccggggattgatacgca

SEQ ID NO: 10867 - DNA, 38 bp, Artificial Sequence
  Synthetic oligonucleotide
aaccgcaagagatgtccacgtactgctggcatgtttga

SEQ ID NO: 10868 - DNA, 34 bp, Artificial Sequence
  Synthetic oligonucleotide
acgatcacatcaaggcggtctcagaggcctaatt

SEQ ID NO: 10869 - DNA, 35 bp, Artificial Sequence
  Synthetic oligonucleotide
gacaacgtacggtaagatgcacaaaaccaatacca

SEQ ID NO: 10870 - DNA, 37 bp, Artificial Sequence
  Synthetic oligonucleotide
gacacatcgggggtgaaccgcgactatcgtgcctcga

SEQ ID NO: 10871 - DNA, 36 bp, Artificial Sequence
  Synthetic oligonucleotide
gacatccacacatgcgcacgtctccactctattact

SEQ ID NO: 10872 - DNA, 36 bp, Artificial Sequence
  Synthetic oligonucleotide
gaccaaacatgcaaatactgtagcataaagacacaa

SEQ ID NO: 10873 - DNA, 37 bp, Artificial Sequence
  Synthetic oligonucleotide
gaccccattcaccggggagggccggcctcattaagga

SEQ ID NO: 10874 - DNA, 35 bp, Artificial Sequence
  Synthetic oligonucleotide
gacccgacggccgaaacaatatcgtttagtgtatg

SEQ ID NO: 10875 - DNA, 38 bp, Artificial Sequence
  Synthetic oligonucleotide
gacgaccccaggctgcctacaatcctgccatctaatga

SEQ ID NO: 10876 - DNA, 33 bp, Artificial Sequence
  Synthetic oligonucleotide
gacgaccccgccatccgaatagcctccccctga

SEQ ID NO: 10877 - DNA, 37 bp, Artificial Sequence
  Synthetic oligonucleotide
gacgcccacgcgccatgcttttcatttcacccattga

SEQ ID NO: 10878 - DNA, 36 bp, Artificial Sequence
  Synthetic oligonucleotide
gagacgtacgtacatacggcctagaggtaggtatca

SEQ ID NO: 10879 - DNA, 38 bp, Artificial Sequence
  Synthetic oligonucleotide
gagcccaccgcgactgctcaggcgttttttcctcatga

SEQ ID NO: 10880 - DNA, 36 bp, Artificial Sequence
  Synthetic oligonucleotide
gcaaactgcagccagtacgatcgctgacagccgaaa

SEQ ID NO: 10881 - DNA, 37 bp, Artificial Sequence
  Synthetic oligonucleotide
gcacgcgccacctatgccagctgccattcttcacgga

SEQ ID NO: 10882 - DNA, 38 bp, Artificial Sequence
  Synthetic oligonucleotide
gccccaatcagctggccatgagagagtcctcttcttga

SEQ ID NO: 10883 - DNA, 35 bp, Artificial Sequence
  Synthetic oligonucleotide
gccgcacaaactgttgcctggagtgcatcgtacga

SEQ ID NO: 10884 - DNA, 35 bp, Artificial Sequence
  Synthetic oligonucleotide
gccgccccggtgtctccgccatgttcctttcgttt

SEQ ID NO: 10885 - DNA, 35 bp, Artificial Sequence
  Synthetic oligonucleotide
gcgtagcacgatggacttctacagcactagactgc

SEQ ID NO: 10886 - DNA, 35 bp, Artificial Sequence
  Synthetic oligonucleotide
gctgcataagcgcatcatacaaagtgacgcaagcg

SEQ ID NO: 10887 - DNA, 35 bp, Artificial Sequence
  Synthetic oligonucleotide
gctgccagagctgaaacgctttaagggacgcatca

SEQ ID NO: 10888 - DNA, 36 bp, Artificial Sequence
  Synthetic oligonucleotide
ggacgcagtccaacaggtgttaacctaagttaggca

SEQ ID NO: 10889 - DNA, 38 bp, Artificial Sequence
  Synthetic oligonucleotide
gtcacacgatcggcttcggaggcatcacatatgcatga

SEQ ID NO: 10890 - DNA, 37 bp, Artificial Sequence
  Synthetic oligonucleotide
gtcgcaaagggagggctatctctagaccaccagcgga

SEQ ID NO: 10891 - DNA, 38 bp, Artificial Sequence
  Synthetic oligonucleotide
gtgcctaccatggcagagcgtactaagaaattgcatga

SEQ ID NO: 10892 - DNA, 36 bp, Artificial Sequence
  Synthetic oligonucleotide
tacgactcatgcgcccgtgaataaggtacctcgtta

SEQ ID NO: 10893 - DNA, 35 bp, Artificial Sequence
  Synthetic oligonucleotide
tcatgcacgcactgttgatcatctccaggttgtac

SEQ ID NO: 10894 - DNA, 36 bp, Artificial Sequence
  Synthetic oligonucleotide
tccgacccgtgcaccagcgctaataaccacgatcta

SEQ ID NO: 10895 - DNA, 35 bp, Artificial Sequence
  Synthetic oligonucleotide
tccgccgagcaccgagtaaagctcacacattcgag

SEQ ID NO: 10896 - DNA, 37 bp, Artificial Sequence
  Synthetic oligonucleotide
tgacaacggtggacactgaccaaatagcagtttatga

SEQ ID NO: 10897 - DNA, 37 bp, Artificial Sequence
  Synthetic oligonucleotide
tgccaccaatcaactcattccaacacagtccgaacga

SEQ ID NO: 10898 - DNA, 35 bp, Artificial Sequence
  Synthetic oligonucleotide
tgccccgcgggtcttttggcgtatatccttgctct

SEQ ID NO: 10899 - DNA, 37 bp, Artificial Sequence
  Synthetic oligonucleotide
ttgcgccgagtcatgatccaatgcacaaatgtatgga

SEQ ID NO: 10900 - DNA, 37 bp, Artificial Sequence
  Synthetic oligonucleotide
ttgggagcacactgctgagtaacgtgccatggccaga

SEQ ID NO: 10901 - DNA, 38 bp, Artificial Sequence
  Synthetic oligonucleotide
aaacgcaacagacatgacctatcacgctcccaagctga

SEQ ID NO: 10902 - DNA, 35 bp, Artificial Sequence
  Synthetic oligonucleotide
aaagccacacgaccagaccccgttttactacccag

SEQ ID NO: 10903 - DNA, 38 bp, Artificial Sequence
  Synthetic oligonucleotide
aatgcaggctgactccggcttagacacacggcatatga

SEQ ID NO: 10904 - DNA, 36 bp, Artificial Sequence
  Synthetic oligonucleotide
acaccacaacctagaatcgaagtgacttcaagtgca

SEQ ID NO: 10905 - DNA, 35 bp, Artificial Sequence
  Synthetic oligonucleotide
acactccgaggaatacacgtacacaaagccgtgct

SEQ ID NO: 10906 - DNA, 35 bp, Artificial Sequence
  Synthetic oligonucleotide
accgaaccccagtatcgcctgcagtaagaaggcca

SEQ ID NO: 10907 - DNA, 35 bp, Artificial Sequence
  Synthetic oligonucleotide
acgcacgtacattgcttgcgagcccaattcatcca

SEQ ID NO: 10908 - DNA, 35 bp, Artificial Sequence
  Synthetic oligonucleotide
agtgcaaccccccacgatacccgcgacctgcacgt

SEQ ID NO: 10909 - DNA, 38 bp, Artificial Sequence
  Synthetic oligonucleotide
atgcccacgacagagatgtagatgccatccctcactga

SEQ ID NO: 10910 - DNA, 35 bp, Artificial Sequence
  Synthetic oligonucleotide
gaaacgcccgaagagcatggcaaagagatctaggg

SEQ ID NO: 10911 - DNA, 38 bp, Artificial Sequence
  Synthetic oligonucleotide
gaacaacgcaaaaggctcagatttaccggtgctaatga

SEQ ID NO: 10912 - DNA, 37 bp, Artificial Sequence
  Synthetic oligonucleotide
gacacccagcctccatcccaacgtgccctacgaacga

SEQ ID NO: 10913 - DNA, 35 bp, Artificial Sequence
  Synthetic oligonucleotide
gacaccgaggcccatgacaagggtaacatttcgtc

SEQ ID NO: 10914 - DNA, 38 bp, Artificial Sequence
  Synthetic oligonucleotide
gacacgggcacaacgtttctcgaacggacaatgtatga

SEQ ID NO: 10915 - DNA, 35 bp, Artificial Sequence
  Synthetic oligonucleotide
gacccaccagacacttactgagccccgaccctacg

SEQ ID NO: 10916 - DNA, 38 bp, Artificial Sequence
  Synthetic oligonucleotide
gacgacgcaaaccatcgcatgacggaaatcctgtctga

SEQ ID NO: 10917 - DNA, 35 bp, Artificial Sequence
  Synthetic oligonucleotide
gacgcacgccgaggaatcataccccagtaggactg

SEQ ID NO: 10918 - DNA, 37 bp, Artificial Sequence
  Synthetic oligonucleotide
gacgcaggagaaggctcgtacgagaaagacggatcga

SEQ ID NO: 10919 - DNA, 36 bp, Artificial Sequence
  Synthetic oligonucleotide
gacgtgccaaagacgtcaaagtgtcaggaattagta

SEQ ID NO: 10920 - DNA, 36 bp, Artificial Sequence
  Synthetic oligonucleotide
gactgcagggtgcacgactgcttatgatccccgcta

SEQ ID NO: 10921 - DNA, 37 bp, Artificial Sequence
  Synthetic oligonucleotide
gagagcgcacctgctataattagtggcacccgagaga

SEQ ID NO: 10922 - DNA, 35 bp, Artificial Sequence
  Synthetic oligonucleotide
gagcgccgccgccgggattgacaccattgggccac

SEQ ID NO: 10923 - DNA, 35 bp, Artificial Sequence
  Synthetic oligonucleotide
gaggactgccagtcaccagggagcgagagcagtaa

SEQ ID NO: 10924 - DNA, 38 bp, Artificial Sequence
  Synthetic oligonucleotide
gagtcgtgccagtcgaaatcccgtcatattctcggtga

SEQ ID NO: 10925 - DNA, 38 bp, Artificial Sequence
  Synthetic oligonucleotide
gatcggcaggcatgagctgatgcctgtagtcaggttga

SEQ ID NO: 10926 - DNA, 36 bp, Artificial Sequence
  Synthetic oligonucleotide
gatgcgacagggcatgaacagtccaaaaagtgtcaa

SEQ ID NO: 10927 - DNA, 37 bp, Artificial Sequence
  Synthetic oligonucleotide
gatgcgcaacaacagcagtacggagactggtgggaga

SEQ ID NO: 10928 - DNA, 35 bp, Artificial Sequence
  Synthetic oligonucleotide
gcaaacggaagtgcccagaaacagacattaaggta

SEQ ID NO: 10929 - DNA, 36 bp, Artificial Sequence
  Synthetic oligonucleotide
gcaacccagagtgcgatctctgttcctacacgttca

SEQ ID NO: 10930 - DNA, 35 bp, Artificial Sequence
  Synthetic oligonucleotide
gccacctccgacgccatcagcacacgtggcctgca

SEQ ID NO: 10931 - DNA, 37 bp, Artificial Sequence
  Synthetic oligonucleotide
gccgaacggggcaagatgaaaggatacggacttatga

SEQ ID NO: 10932 - DNA, 35 bp, Artificial Sequence
  Synthetic oligonucleotide
gccgaagcacccctcagttctccattcggccactc

SEQ ID NO: 10933 - DNA, 38 bp, Artificial Sequence
  Synthetic oligonucleotide
gccgataagagcagagtacaggacggcgactacgttga

SEQ ID NO: 10934 - DNA, 35 bp, Artificial Sequence
  Synthetic oligonucleotide
gccggactgcatggaggtacgtaaagaggaaatcg

SEQ ID NO: 10935 - DNA, 37 bp, Artificial Sequence
  Synthetic oligonucleotide
gcgaacgggctgcagctgcgaacagtttctaccttga

SEQ ID NO: 10936 - DNA, 35 bp, Artificial Sequence
  Synthetic oligonucleotide
gcgaccgcaaccgatatcacgtatcccatggtacg

SEQ ID NO: 10937 - DNA, 36 bp, Artificial Sequence
  Synthetic oligonucleotide
gctcaggacacttccgaatgcgcgtcgtcgcactga

SEQ ID NO: 10938 - DNA, 38 bp, Artificial Sequence
  Synthetic oligonucleotide
gtgagcgtaagaacagcgtataccgatgtttagagtga

SEQ ID NO: 10939 - DNA, 35 bp, Artificial Sequence
  Synthetic oligonucleotide
gtgtgaggcaagggtttatgaagacttttcgtatc

SEQ ID NO: 10940 - DNA, 36 bp, Artificial Sequence
  Synthetic oligonucleotide
taagacgccacagaggtagttgagtccgtgtgtcaa

SEQ ID NO: 10941 - DNA, 35 bp, Artificial Sequence
  Synthetic oligonucleotide
tacacatcgcagtggttcctcaacaggtaggcctc

SEQ ID NO: 10942 - DNA, 37 bp, Artificial Sequence
  Synthetic oligonucleotide
tacgaccggtggacaaagcctcactaaattgggtaga

SEQ ID NO: 10943 - DNA, 38 bp, Artificial Sequence
  Synthetic oligonucleotide
tcaatcggccgcaatataaggcgaggtcactggggtga

SEQ ID NO: 10944 - DNA, 35 bp, Artificial Sequence
  Synthetic oligonucleotide
tcagggtggcactcacgcacacggttgcagtactg

SEQ ID NO: 10945 - DNA, 38 bp, Artificial Sequence
  Synthetic oligonucleotide
tgacacacaggatgcttaggggcggataaatgttttga

SEQ ID NO: 10946 - DNA, 37 bp, Artificial Sequence
  Synthetic oligonucleotide
tgacgtacccgacgatgtaacaacagtcgttctctga

SEQ ID NO: 10947 - DNA, 36 bp, Artificial Sequence
  Synthetic oligonucleotide
tgacgtgctgcagacgttcactagcggcctatctaa

SEQ ID NO: 10948 - DNA, 35 bp, Artificial Sequence
  Synthetic oligonucleotide
tgactgcgcatccacactcgaaaccgtaacgacgg

SEQ ID NO: 10949 - DNA, 37 bp, Artificial Sequence
  Synthetic oligonucleotide
tgatgcgtgaggtgaacagggagacatccattccaga

SEQ ID NO: 10950 - DNA, 37 bp, Artificial Sequence
  Synthetic oligonucleotide
tgcaacggggggagaggaggcgacgtggtcaggttga

SEQ ID NO: 10951 - DNA, 34 bp, Artificial Sequence
  Synthetic oligonucleotide
aacgagatgtcccaacagcctcggactacattat

SEQ ID NO: 10952 - DNA, 38 bp, Artificial Sequence
  Synthetic oligonucleotide
acacaagctgccgagtaggtgaatgaatgatgacttga

SEQ ID NO: 10953 - DNA, 38 bp, Artificial Sequence
  Synthetic oligonucleotide
accaagcataggtatcacgatcatcgacacgttaacga

SEQ ID NO: 10954 - DNA, 38 bp, Artificial Sequence
  Synthetic oligonucleotide
accacacgaatccccaggacgtcgatcaccttatctga

SEQ ID NO: 10955 - DNA, 37 bp, Artificial Sequence
  Synthetic oligonucleotide
accacgaacagcaccaggcacagcaagtttgaggcga

SEQ ID NO: 10956 - DNA, 35 bp, Artificial Sequence
  Synthetic oligonucleotide
accactgccgaaaacgtaaagcatgcactctgcta

SEQ ID NO: 10957 - DNA, 35 bp, Artificial Sequence
  Synthetic oligonucleotide
accatcccaatggtccgatcgaaactcgcgcgaac

SEQ ID NO: 10958 - DNA, 38 bp, Artificial Sequence
  Synthetic oligonucleotide
acccacggacgaaagggcacgttatgacctccatttga

SEQ ID NO: 10959 - DNA, 36 bp, Artificial Sequence
  Synthetic oligonucleotide
accgacggtccccgagctattctgcagttcttacaa

SEQ ID NO: 10960 - DNA, 38 bp, Artificial Sequence
  Synthetic oligonucleotide
actgcgacatccgtactggtccactcttcgctggttga

SEQ ID NO: 10961 - DNA, 37 bp, Artificial Sequence
  Synthetic oligonucleotide
atcacgacaatagctgtagtgtgcttttccttaccga

SEQ ID NO: 10962 - DNA, 35 bp, Artificial Sequence
  Synthetic oligonucleotide
atgcaaacaggtcccaccctgagaagcaggcttag

SEQ ID NO: 10963 - DNA, 38 bp, Artificial Sequence
  Synthetic oligonucleotide
atgcacacagctgctcatttaatcatttccatacatga

SEQ ID NO: 10964 - DNA, 36 bp, Artificial Sequence
  Synthetic oligonucleotide
atgcccatcccactccttaagacacggcggaacgca

SEQ ID NO: 10965 - DNA, 37 bp, Artificial Sequence
  Synthetic oligonucleotide
attcacgcctgtcggcctcccgtcgattgtcgaggga

SEQ ID NO: 10966 - DNA, 37 bp, Artificial Sequence
  Synthetic oligonucleotide
attgtgccactagatcagtttgggagacgaaactgga

SEQ ID NO: 10967 - DNA, 35 bp, Artificial Sequence
  Synthetic oligonucleotide
cagagcgacacaccacgctatacttccacacctgc

SEQ ID NO: 10968 - DNA, 37 bp, Artificial Sequence
  Synthetic oligonucleotide
gaacagaccggaggtagacgatgcgctttacacatga

SEQ ID NO: 10969 - DNA, 38 bp, Artificial Sequence
  Synthetic oligonucleotide
gaagccatggtaggatgagagcaggtctaacagtttga

SEQ ID NO: 10970 - DNA, 36 bp, Artificial Sequence
  Synthetic oligonucleotide
gaatgcatgcctgtatttacgtgatatagtcgtcca

SEQ ID NO: 10971 - DNA, 36 bp, Artificial Sequence
  Synthetic oligonucleotide
gacaacgagggtgtaacaatctgccacgttatcgta

SEQ ID NO: 10972 - DNA, 38 bp, Artificial Sequence
  Synthetic oligonucleotide
gacaagcgtgggaagaagaatccgacagttgggcttga

SEQ ID NO: 10973 - DNA, 37 bp, Artificial Sequence
  Synthetic oligonucleotide
gacacacgcatcgtgacagcatatctgccagtcgtga

SEQ ID NO: 10974 - DNA, 36 bp, Artificial Sequence
  Synthetic oligonucleotide
gacacgagcagagtgtgattgggatcattcccttga

SEQ ID NO: 10975 - DNA, 37 bp, Artificial Sequence
  Synthetic oligonucleotide
gaccaccgccgaggattggaatgggtacgcatgtaga

SEQ ID NO: 10976 - DNA, 38 bp, Artificial Sequence
  Synthetic oligonucleotide
gaccaggagggccattacaagtcgatacgaagtggtga

SEQ ID NO: 10977 - DNA, 38 bp, Artificial Sequence
  Synthetic oligonucleotide
gagtgcgcacccgatgacgtacatcctgaaagtcgtga

SEQ ID NO: 10978 - DNA, 35 bp, Artificial Sequence
  Synthetic oligonucleotide
gatgcgacaagaggcgttacgaaagcatgcttctc

SEQ ID NO: 10979 - DNA, 37 bp, Artificial Sequence
  Synthetic oligonucleotide
gatgcgcgcggggatgatgctctaggatttgccggga

SEQ ID NO: 10980 - DNA, 37 bp, Artificial Sequence
  Synthetic oligonucleotide
gcaccagggctaagagcggggttggacgcctggggga

SEQ ID NO: 10981 - DNA, 36 bp, Artificial Sequence
  Synthetic oligonucleotide
gcaccccagaccagaggcacaaatctctactattga

SEQ ID NO: 10982 - DNA, 37 bp, Artificial Sequence
  Synthetic oligonucleotide
gccatggccagaagatgatatgcgattcggtgagaga

SEQ ID NO: 10983 - DNA, 36 bp, Artificial Sequence
  Synthetic oligonucleotide
gcccaatccccgaggagcacatcacgagtttgaaga

SEQ ID NO: 10984 - DNA, 36 bp, Artificial Sequence
  Synthetic oligonucleotide
gccgaacggcacagtcacaggacacgtgagggttaa

SEQ ID NO: 10985 - DNA, 38 bp, Artificial Sequence
  Synthetic oligonucleotide
gctcccaacaggacgctagacggacgtcggttacgtga

SEQ ID NO: 10986 - DNA, 35 bp, Artificial Sequence
  Synthetic oligonucleotide
gtcgacgagccgcacacgttatcactttatacccc

SEQ ID NO: 10987 - DNA, 35 bp, Artificial Sequence
  Synthetic oligonucleotide
gtgcgccatggtcaaaagcaccgtccgatcgccga

SEQ ID NO: 10988 - DNA, 35 bp, Artificial Sequence
  Synthetic oligonucleotide
taaattcaaacggtgcccctgacgaatggacggac

SEQ ID NO: 10989 - DNA, 36 bp, Artificial Sequence
  Synthetic oligonucleotide
tagcgccaaaggaaccgaaaaacgctgaccgctgga

SEQ ID NO: 10990 - DNA, 35 bp, Artificial Sequence
  Synthetic oligonucleotide
tatgcggtacagtgaattacgtagagaagtcgaaa

SEQ ID NO: 10991 - DNA, 35 bp, Artificial Sequence
  Synthetic oligonucleotide
tcacccgatcagccgtaacatcgcaagaactaagt

SEQ ID NO: 10992 - DNA, 38 bp, Artificial Sequence
  Synthetic oligonucleotide
tcacgttgcaccgtatcgccgaagtacagtcagagtga

SEQ ID NO: 10993 - DNA, 36 bp, Artificial Sequence
  Synthetic oligonucleotide
tcagacccacgcaatcatgtgcctcctgaacccata

SEQ ID NO: 10994 - DNA, 35 bp, Artificial Sequence
  Synthetic oligonucleotide
tccaagcgcaccagtgaatcagggaacaaatcggt

SEQ ID NO: 10995 - DNA, 35 bp, Artificial Sequence
  Synthetic oligonucleotide
tccaccgtagtggtataacgttagagtggggcgga

SEQ ID NO: 10996 - DNA, 37 bp, Artificial Sequence
  Synthetic oligonucleotide
tcccgcaaaggtgttgagttagccgcattcctcgcga

SEQ ID NO: 10997 - DNA, 37 bp, Artificial Sequence
  Synthetic oligonucleotide
tgaacgcagatggagtcgttgcgataggtcaccgtga

SEQ ID NO: 10998 - DNA, 37 bp, Artificial Sequence
  Synthetic oligonucleotide
tgaccgacctcgcgcccatcgtggcatgtctcggtga

SEQ ID NO: 10999 - DNA, 37 bp, Artificial Sequence
  Synthetic oligonucleotide
tgatcaccggccttgacgtcctccagaacactactga

SEQ ID NO: 11000 - DNA, 38 bp, Artificial Sequence
  Synthetic oligonucleotide
tgatgacgtaaaccacggacaatctactcgcgacttga

SEQ ID NO: 11001 - DNA, 37 bp, Artificial Sequence
  Synthetic oligonucleotide
tgcgcccagggagcagtaactagccgaatctcccgga

SEQ ID NO: 11002 - DNA, 35 bp, Artificial Sequence
  Synthetic oligonucleotide
tgtgacactcaggcatgttgtgagctcttctttaa

SEQ ID NO: 11003 - DNA, 37 bp, Artificial Sequence
  Synthetic oligonucleotide
ttgcgcccaaccagcacgcgttccgctggaagtgtga

SEQ ID NO: 11004 - DNA, 38 bp, Artificial Sequence
  Synthetic oligonucleotide
aacatgcgcgaaatcagactgtcgacgttgactgctga

SEQ ID NO: 11005 - DNA, 35 bp, Artificial Sequence
  Synthetic oligonucleotide
acaccgcacggctcccgatcagttgtgcgcgatca

SEQ ID NO: 11006 - DNA, 38 bp, Artificial Sequence
  Synthetic oligonucleotide
acaccgcgcctagcatgcgtactttccccaccttttga

SEQ ID NO: 11007 - DNA, 38 bp, Artificial Sequence
  Synthetic oligonucleotide
accacccacagcccgtataccgcacagctcggctatga

SEQ ID NO: 11008 - DNA, 36 bp, Artificial Sequence
  Synthetic oligonucleotide
acctgccccaacatacagaccccgttaccttattaa

SEQ ID NO: 11009 - DNA, 38 bp, Artificial Sequence
  Synthetic oligonucleotide
agcccaggacaggcctatgtgactcgtagacttgctga

SEQ ID NO: 11010 - DNA, 36 bp, Artificial Sequence
  Synthetic oligonucleotide
atgccgcgaggtactacgtgaagttaaggaggggga

SEQ ID NO: 11011 - DNA, 35 bp, Artificial Sequence
  Synthetic oligonucleotide
ctgccgtagaggagcgatacacgaaacaggtgata

SEQ ID NO: 11012 - DNA, 36 bp, Artificial Sequence
  Synthetic oligonucleotide
gacccaacaacggactcgagggataggttgggaata

SEQ ID NO: 11013 - DNA, 31 bp, Artificial Sequence
  Synthetic oligonucleotide
gacgccgacctacaatccccctgtgaacctg

SEQ ID NO: 11014 - DNA, 35 bp, Artificial Sequence
  Synthetic oligonucleotide
gacgcgtagaggaatgggtccgagcacaagcgtat

SEQ ID NO: 11015 - DNA, 38 bp, Artificial Sequence
  Synthetic oligonucleotide
gacgtgcaacggaaaaacgggtggcgaaggggacatga

SEQ ID NO: 11016 - DNA, 35 bp, Artificial Sequence
  Synthetic oligonucleotide
gagtcgcaacgcatgattaggggcgtgggctaacg

SEQ ID NO: 11017 - DNA, 37 bp, Artificial Sequence
  Synthetic oligonucleotide
gatgcaacccagcagggtcacgcagagaggtcacaga

SEQ ID NO: 11018 - DNA, 35 bp, Artificial Sequence
  Synthetic oligonucleotide
gcaaaccgtcccaacggagaatggctatacgattg

SEQ ID NO: 11019 - DNA, 37 bp, Artificial Sequence
  Synthetic oligonucleotide
gcaaccgcctgtccgtgtcgacacgttatctcaggga

SEQ ID NO: 11020 - DNA, 35 bp, Artificial Sequence
  Synthetic oligonucleotide
gcacatccgttacgccggtacagtaagtgcgattt

SEQ ID NO: 11021 - DNA, 37 bp, Artificial Sequence
  Synthetic oligonucleotide
gcaccatcatcgctgataacggacccaggtattggga

SEQ ID NO: 11022 - DNA, 36 bp, Artificial Sequence
  Synthetic oligonucleotide
gcaccgctaagaaggtgcggtgagtgagatagacca

SEQ ID NO: 11023 - DNA, 38 bp, Artificial Sequence
  Synthetic oligonucleotide
gcacgccctcgccatatgaggttactcgactgggatga

SEQ ID NO: 11024 - DNA, 36 bp, Artificial Sequence
  Synthetic oligonucleotide
gccaacgacacaagtagttcaaggaggcttaggcaa

SEQ ID NO: 11025 - DNA, 35 bp, Artificial Sequence
  Synthetic oligonucleotide
gcccggaccacgttacagacccccagacgcgtggg

SEQ ID NO: 11026 - DNA, 36 bp, Artificial Sequence
  Synthetic oligonucleotide
gccgagcgaggctagtacagcaacgtcccctcctta

SEQ ID NO: 11027 - DNA, 38 bp, Artificial Sequence
  Synthetic oligonucleotide
gcctcagactcgggtcgaggaaacatggtcactactga

SEQ ID NO: 11028 - DNA, 36 bp, Artificial Sequence
  Synthetic oligonucleotide
gcgaagcaccccacatgaacgatcccggatcttgga

SEQ ID NO: 11029 - DNA, 37 bp, Artificial Sequence
  Synthetic oligonucleotide
gctacatatcactgaccccgtttaaagcagcaatgga

SEQ ID NO: 11030 - DNA, 37 bp, Artificial Sequence
  Synthetic oligonucleotide
gctcaggacacggatgggtaacaaccgctcgaacgga

SEQ ID NO: 11031 - DNA, 36 bp, Artificial Sequence
  Synthetic oligonucleotide
gtgcaaccgcaaccgtaaatccaggccatcatacta

SEQ ID NO: 11032 - DNA, 38 bp, Artificial Sequence
  Synthetic oligonucleotide
gtgggacacacgtggatcgcggcaccacttaacggtga

SEQ ID NO: 11033 - DNA, 35 bp, Artificial Sequence
  Synthetic oligonucleotide
gtggtcaccggaagttgctcacacaaactgctgtg

SEQ ID NO: 11034 - DNA, 35 bp, Artificial Sequence
  Synthetic oligonucleotide
tacgcaatgagagcagggggtgcacgaaaagagtg

SEQ ID NO: 11035 - DNA, 35 bp, Artificial Sequence
  Synthetic oligonucleotide
tcagacacgacagattgatcacgccaacccatccc

SEQ ID NO: 11036 - DNA, 36 bp, Artificial Sequence
  Synthetic oligonucleotide
tcatcaccacaacgttagcaatattagtgtaccgta

SEQ ID NO: 11037 - DNA, 37 bp, Artificial Sequence
  Synthetic oligonucleotide
tgacgaccccggtagcacggactcgatcactctcgga

SEQ ID NO: 11038 - DNA, 36 bp, Artificial Sequence
  Synthetic oligonucleotide
tgacggacgcccactgtctgaatagggccgactcta

SEQ ID NO: 11039 - DNA, 36 bp, Artificial Sequence
  Synthetic oligonucleotide
tgcgaaccgcatcatattgaccatggaaccggagca

SEQ ID NO: 11040 - DNA, 38 bp, Artificial Sequence
  Synthetic oligonucleotide
tgcgaacgcacagtcctttgaactatcacaatccgtga

SEQ ID NO: 11041 - DNA, 38 bp, Artificial Sequence
  Synthetic oligonucleotide
tgcgacccccagcaacgtgtcatacatgaacttcgtga

SEQ ID NO: 11042 - DNA, 35 bp, Artificial Sequence
  Synthetic oligonucleotide
ttcggaaacgcaccggttgtatgtatcgtcattgc

SEQ ID NO: 11043 - DNA, 36 bp, Artificial Sequence
  Synthetic oligonucleotide
ttgcaccatacacgctagatcacccacaccacatga

SEQ ID NO: 11044 - DNA, 35 bp, Artificial Sequence
  Synthetic oligonucleotide
aaccaacgtctccgtatcccgtttcccaagcggtg

SEQ ID NO: 11045 - DNA, 35 bp, Artificial Sequence
  Synthetic oligonucleotide
aaccaccgaccaaaccccagtacgtgtgaacgttt

SEQ ID NO: 11046 - DNA, 35 bp, Artificial Sequence
  Synthetic oligonucleotide
aatgccgcaacgggacgtgtttctgttcctgttga

SEQ ID NO: 11047 - DNA, 35 bp, Artificial Sequence
  Synthetic oligonucleotide
acacacgcagtatatacgtgctgacgcctatcgcg

SEQ ID NO: 11048 - DNA, 35 bp, Artificial Sequence
  Synthetic oligonucleotide
acactgcagggtgatggccaatggtcgtagaacat

SEQ ID NO: 11049 - DNA, 37 bp, Artificial Sequence
  Synthetic oligonucleotide
accacacccagtaggaagcgttgggacgaacaaccga

SEQ ID NO: 11050 - DNA, 35 bp, Artificial Sequence
  Synthetic oligonucleotide
accacaccgagcgccttagacatccttcagaatgg

SEQ ID NO: 11051 - DNA, 36 bp, Artificial Sequence
  Synthetic oligonucleotide
accacccacagatgacgtacggatgatcggactcaa

SEQ ID NO: 11052 - DNA, 35 bp, Artificial Sequence
  Synthetic oligonucleotide
accacgccacaagtttcgctgcagtttcgcttgaa

SEQ ID NO: 11053 - DNA, 37 bp, Artificial Sequence
  Synthetic oligonucleotide
acccacgcctcattcgctactaactagactcaatgga

SEQ ID NO: 11054 - DNA, 35 bp, Artificial Sequence
  Synthetic oligonucleotide
acgaaccaccccgcacagtgtataacacaccactg

SEQ ID NO: 11055 - DNA, 38 bp, Artificial Sequence
  Synthetic oligonucleotide
actcacgtccggacctcgattgtagccacatgtcatga

SEQ ID NO: 11056 - DNA, 38 bp, Artificial Sequence
  Synthetic oligonucleotide
atccaccacggcgtaagagataaatgggtctctgctga

SEQ ID NO: 11057 - DNA, 37 bp, Artificial Sequence
  Synthetic oligonucleotide
atctgcacgagaccacagtacattcaccatttgttga

SEQ ID NO: 11058 - DNA, 36 bp, Artificial Sequence
  Synthetic oligonucleotide
cacacttcgcgagatacgctatgcgcgcatgaatca

SEQ ID NO: 11059 - DNA, 38 bp, Artificial Sequence
  Synthetic oligonucleotide
catgggcgacacgcaagtacaggtcgtttgtataatga

SEQ ID NO: 11060 - DNA, 38 bp, Artificial Sequence
  Synthetic oligonucleotide
gaaacacccccagcacccaccccgattcagtgcattga

SEQ ID NO: 11061 - DNA, 36 bp, Artificial Sequence
  Synthetic oligonucleotide
gacaacagaaggcggtctggaaaatgactctttgga

SEQ ID NO: 11062 - DNA, 36 bp, Artificial Sequence
  Synthetic oligonucleotide
gacaagcacacacgataagcctcgtcgttcctcata

SEQ ID NO: 11063 - DNA, 37 bp, Artificial Sequence
  Synthetic oligonucleotide
gacagacctgcaatgaccccggacaaaagttactcga

SEQ ID NO: 11064 - DNA, 36 bp, Artificial Sequence
  Synthetic oligonucleotide
gacatgggcacaggacaggtcacgtgtatgtacaaa

SEQ ID NO: 11065 - DNA, 38 bp, Artificial Sequence
  Synthetic oligonucleotide
gacgaacgtacctcagacgtgagaatatttcgacgtga

SEQ ID NO: 11066 - DNA, 35 bp, Artificial Sequence
  Synthetic oligonucleotide
gacgcacacaacatgtgatgtgccagaactccgcg

SEQ ID NO: 11067 - DNA, 36 bp, Artificial Sequence
  Synthetic oligonucleotide
gacgcccaacggtccgcactctatctgacacgccaa

SEQ ID NO: 11068 - DNA, 37 bp, Artificial Sequence
  Synthetic oligonucleotide
gaggaccccaatggtacattagcgggagacgagctga

SEQ ID NO: 11069 - DNA, 36 bp, Artificial Sequence
  Synthetic oligonucleotide
gagtgccccatcaaatgtccatcgcctttttcctta

SEQ ID NO: 11070 - DNA, 36 bp, Artificial Sequence
  Synthetic oligonucleotide
gcaacgcccgctctacctcagtggtcaacgccctca

SEQ ID NO: 11071 - DNA, 38 bp, Artificial Sequence
  Synthetic oligonucleotide
gcacctggtcgtcaagtatggtaacaaggacaatgtga

SEQ ID NO: 11072 - DNA, 35 bp, Artificial Sequence
  Synthetic oligonucleotide
gcagaccgtgcagatcgcaaatcacggcatacagc

SEQ ID NO: 11073 - DNA, 37 bp, Artificial Sequence
  Synthetic oligonucleotide
gcatgctgacggtaacaataaggaaggcatgtccgga

SEQ ID NO: 11074 - DNA, 38 bp, Artificial Sequence
  Synthetic oligonucleotide
gccgaggaggccgtacgataagcacaatgctctgatga

SEQ ID NO: 11075 - DNA, 38 bp, Artificial Sequence
  Synthetic oligonucleotide
ggaacacgtcgcactgtttgcatgacttgtggttctga

SEQ ID NO: 11076 - DNA, 35 bp, Artificial Sequence
  Synthetic oligonucleotide
gtacaaccgcatcaccgtgtgcatcgggtatctgg

SEQ ID NO: 11077 - DNA, 37 bp, Artificial Sequence
  Synthetic oligonucleotide
gtaggggcgcaggggttagagttagttttggagctaa

SEQ ID NO: 11078 - DNA, 36 bp, Artificial Sequence
  Synthetic oligonucleotide
gtgagcgcgagatcccaatccgatccacaacaggga

SEQ ID NO: 11079 - DNA, 35 bp, Artificial Sequence
  Synthetic oligonucleotide
tagtgcacgccgatctattgtagggacacttcgct

SEQ ID NO: 11080 - DNA, 35 bp, Artificial Sequence
  Synthetic oligonucleotide
tagtgccggtccaagagtgggtaatgcattgatgt

SEQ ID NO: 11081 - DNA, 36 bp, Artificial Sequence
  Synthetic oligonucleotide
tatccagcaacagtagtcatggcagttccgcacaaa

SEQ ID NO: 11082 - DNA, 35 bp, Artificial Sequence
  Synthetic oligonucleotide
tcacaccgccaggcgggggtacatgaagctatagg

SEQ ID NO: 11083 - DNA, 35 bp, Artificial Sequence
  Synthetic oligonucleotide
tcccagccgcctaccctacaatgtcgctactccgc

SEQ ID NO: 11084 - DNA, 38 bp, Artificial Sequence
  Synthetic oligonucleotide
tgtgggacggtaaatgtgccgcatcacgtccgtcatga

SEQ ID NO: 11085 - DNA, 34 bp, Artificial Sequence
  Synthetic oligonucleotide
aacccaaccaccagagtcgatacagggtgacgtg

SEQ ID NO: 11086 - DNA, 35 bp, Artificial Sequence
  Synthetic oligonucleotide
aacccagcaaggaagcggatgcagaggccacacgt

SEQ ID NO: 11087 - DNA, 36 bp, Artificial Sequence
  Synthetic oligonucleotide
aacggacgtgacagaagtgcggattaaccatctgta

SEQ ID NO: 11088 - DNA, 38 bp, Artificial Sequence
  Synthetic oligonucleotide
acacgcagttggcttgcgatagacggtcggggaattga

SEQ ID NO: 11089 - DNA, 36 bp, Artificial Sequence
  Synthetic oligonucleotide
acactgcaggtaatatgcgcgcacaccacccatcaa

SEQ ID NO: 11090 - DNA, 38 bp, Artificial Sequence
  Synthetic oligonucleotide
acatcccaacactgcgctaacacccgacgacggcctga

SEQ ID NO: 11091 - DNA, 35 bp, Artificial Sequence
  Synthetic oligonucleotide
accacgagccgatgggatcggaccgcatgacaatg

SEQ ID NO: 11092 - DNA, 36 bp, Artificial Sequence
  Synthetic oligonucleotide
accacggtaccgatagagccacgtgtgtgaggtgta

SEQ ID NO: 11093 - DNA, 37 bp, Artificial Sequence
  Synthetic oligonucleotide
acccaagccaggcggtatgagggcaatcgggattaga

SEQ ID NO: 11094 - DNA, 35 bp, Artificial Sequence
  Synthetic oligonucleotide
acccacacgaacggaaacatcgcgactgcctatcg

SEQ ID NO: 11095 - DNA, 35 bp, Artificial Sequence
  Synthetic oligonucleotide
accgccggagtgccgtacacgttctatttttcgct

SEQ ID NO: 11096 - DNA, 38 bp, Artificial Sequence
  Synthetic oligonucleotide
acctcgagccaggcgagattccgtcatttatttgttga

SEQ ID NO: 11097 - DNA, 38 bp, Artificial Sequence
  Synthetic oligonucleotide
actcgcaccggatcggctagacccagcccacctcgtga

SEQ ID NO: 11098 - DNA, 35 bp, Artificial Sequence
  Synthetic oligonucleotide
gaaccaccgccaactctgtcgaacagtagacggtc

SEQ ID NO: 11099 - DNA, 37 bp, Artificial Sequence
  Synthetic oligonucleotide
gacacaaccgggcacaacgtctatttgacatctccga

SEQ ID NO: 11100 - DNA, 36 bp, Artificial Sequence
  Synthetic oligonucleotide
gacacccccgatagatcgtttcgtacggcaaggtaa

SEQ ID NO: 11101 - DNA, 36 bp, Artificial Sequence
  Synthetic oligonucleotide
gacacgcaatgtctatacgccaatgccaaaaacgca

SEQ ID NO: 11102 - DNA, 35 bp, Artificial Sequence
  Synthetic oligonucleotide
gacagagtccgtccctgggagtgctaaaccgcgaa

SEQ ID NO: 11103 - DNA, 37 bp, Artificial Sequence
  Synthetic oligonucleotide
gacccacaacatcagagctgttctaggacacgtctga

SEQ ID NO: 11104 - DNA, 36 bp, Artificial Sequence
  Synthetic oligonucleotide
gaggggcccgacgtcgttgtttgtgttcggttggta

SEQ ID NO: 11105 - DNA, 36 bp, Artificial Sequence
  Synthetic oligonucleotide
gatccacgggccaagttagacgtactagatctgcta

SEQ ID NO: 11106 - DNA, 36 bp, Artificial Sequence
  Synthetic oligonucleotide
gcaacatgcggccgatatgagtgagacggttcacta

SEQ ID NO: 11107 - DNA, 35 bp, Artificial Sequence
  Synthetic oligonucleotide
gcacaagccgaacattctttgtacaataggtgagt

SEQ ID NO: 11108 - DNA, 32 bp, Artificial Sequence
  Synthetic oligonucleotide
gcaccactgaccccgattcgactttacgctaa

SEQ ID NO: 11109 - DNA, 35 bp, Artificial Sequence
  Synthetic oligonucleotide
gcacccaatcgcctctagggtatgacgattactcg

SEQ ID NO: 11110 - DNA, 36 bp, Artificial Sequence
  Synthetic oligonucleotide
gcacgtgacgtaatctggagaagcactggaacgcta

SEQ ID NO: 11111 - DNA, 37 bp, Artificial Sequence
  Synthetic oligonucleotide
gcatacgccactgacctgcacatagtccttctcccga

SEQ ID NO: 11112 - DNA, 35 bp, Artificial Sequence
  Synthetic oligonucleotide
gcatcacagagtagagacgatacatggtccgaggt

SEQ ID NO: 11113 - DNA, 35 bp, Artificial Sequence
  Synthetic oligonucleotide
gccaacgcaagagatgcattggggatacctacaca

SEQ ID NO: 11114 - DNA, 36 bp, Artificial Sequence
  Synthetic oligonucleotide
gccggaacttcatcacatccagtgttgtgacaacga

SEQ ID NO: 11115 - DNA, 35 bp, Artificial Sequence
  Synthetic oligonucleotide
gcgagaacgctaccttataatcactgtgtatgaat

SEQ ID NO: 11116 - DNA, 35 bp, Artificial Sequence
  Synthetic oligonucleotide
gcgatggcataagcatgtaagagggacggattagt

SEQ ID NO: 11117 - DNA, 35 bp, Artificial Sequence
  Synthetic oligonucleotide
ggacagaaccgcagtgaggtgtcgcatgcttcata

SEQ ID NO: 11118 - DNA, 38 bp, Artificial Sequence
  Synthetic oligonucleotide
ggacgcctccaatcccaatgtcaagagacacaccttga

SEQ ID NO: 11119 - DNA, 38 bp, Artificial Sequence
  Synthetic oligonucleotide
gggtacgcccacgtacacacacgaacctactttcatga

SEQ ID NO: 11120 - DNA, 37 bp, Artificial Sequence
  Synthetic oligonucleotide
gtacgcagacggtaggctcttaagggctcgttagcga

SEQ ID NO: 11121 - DNA, 35 bp, Artificial Sequence
  Synthetic oligonucleotide
gtgcaccgaccctcgctgataatgtacgatgcgtt

SEQ ID NO: 11122 - DNA, 35 bp, Artificial Sequence
  Synthetic oligonucleotide
gtgccacgtcgcaggagtaatgactatgtgggaac

SEQ ID NO: 11123 - DNA, 38 bp, Artificial Sequence
  Synthetic oligonucleotide
gttgcgtacgccggccatagcgacaccaccacttctga

SEQ ID NO: 11124 - DNA, 35 bp, Artificial Sequence
  Synthetic oligonucleotide
gttgtgatgctgccaggagtgctacgatttaatcg

SEQ ID NO: 11125 - DNA, 35 bp, Artificial Sequence
  Synthetic oligonucleotide
tacgcgcaaaggttgtgactccagagatcacaatg

SEQ ID NO: 11126 - DNA, 38 bp, Artificial Sequence
  Synthetic oligonucleotide
tacgtgcgcagacgctgattttcaaccacactccctga

SEQ ID NO: 11127 - DNA, 35 bp, Artificial Sequence
  Synthetic oligonucleotide
tcaatgacgcagttcacatattcctacggtgttcc

SEQ ID NO: 11128 - DNA, 38 bp, Artificial Sequence
  Synthetic oligonucleotide
tcatgcacagacgttcacatgcgaattaacgaggatga

SEQ ID NO: 11129 - DNA, 36 bp, Artificial Sequence
  Synthetic oligonucleotide
tccgagggggcatgcacgccgagtgaacgtacggaa

SEQ ID NO: 11130 - DNA, 36 bp, Artificial Sequence
  Synthetic oligonucleotide
tgaccaacgcatgattacgaagacacctcgtcagga

SEQ ID NO: 11131 - DNA, 38 bp, Artificial Sequence
  Synthetic oligonucleotide
tgccaacgtacgcaggttaaggacgagtgttagagtga

SEQ ID NO: 11132 - DNA, 38 bp, Artificial Sequence
  Synthetic oligonucleotide
ttgaccgcattcacgcaagatcataccccatcggctga

SEQ ID NO: 11133 - DNA, 35 bp, Artificial Sequence
  Synthetic oligonucleotide
aacgcctatcacgcactagacggtataatcgtgct

SEQ ID NO: 11134 - DNA, 38 bp, Artificial Sequence
  Synthetic oligonucleotide
aatgcggggtcagctccattaaaaatccacacgagtga

SEQ ID NO: 11135 - DNA, 35 bp, Artificial Sequence
  Synthetic oligonucleotide
acacgccacaggctagtcccacatgttccactgtt

SEQ ID NO: 11136 - DNA, 35 bp, Artificial Sequence
  Synthetic oligonucleotide
acatcagtcggtgccgcatcccgagccctatagcc

SEQ ID NO: 11137 - DNA, 37 bp, Artificial Sequence
  Synthetic oligonucleotide
acatgccgcaaaaatgatgattggtcatgtgatctga

SEQ ID NO: 11138 - DNA, 35 bp, Artificial Sequence
  Synthetic oligonucleotide
accaacgcgtgctgtactagatccgaattcagatg

SEQ ID NO: 11139 - DNA, 36 bp, Artificial Sequence
  Synthetic oligonucleotide
accacaacggcacaggcaagaacagcatgacaccta

SEQ ID NO: 11140 - DNA, 38 bp, Artificial Sequence
  Synthetic oligonucleotide
acgagacggcgcagtgcacaaagaacagtgggttatga

SEQ ID NO: 11141 - DNA, 37 bp, Artificial Sequence
  Synthetic oligonucleotide
acgccgggccaatccagagtgagtgccatgcctctga

SEQ ID NO: 11142 - DNA, 35 bp, Artificial Sequence
  Synthetic oligonucleotide
agtgccgacgaatccttgggggagacggaacgttg

SEQ ID NO: 11143 - DNA, 35 bp, Artificial Sequence
  Synthetic oligonucleotide
agtgcgcactccgcctcatcttagtctcggtgttg

SEQ ID NO: 11144 - DNA, 36 bp, Artificial Sequence
  Synthetic oligonucleotide
atccacagcacagagcgtagagcaggtttgcaggta

SEQ ID NO: 11145 - DNA, 35 bp, Artificial Sequence
  Synthetic oligonucleotide
atccaccgcactcttggtgccaatgtgacgtatga

SEQ ID NO: 11146 - DNA, 35 bp, Artificial Sequence
  Synthetic oligonucleotide
gaatgccgccacgggtgcaaggaggtcaacagttg

SEQ ID NO: 11147 - DNA, 36 bp, Artificial Sequence
  Synthetic oligonucleotide
gacaaccaggtgcgtacatcgcgattgcaaccatca

SEQ ID NO: 11148 - DNA, 36 bp, Artificial Sequence
  Synthetic oligonucleotide
gacaccgaaaggttctgtcctcgtgatcgtgcatca

SEQ ID NO: 11149 - DNA, 35 bp, Artificial Sequence
  Synthetic oligonucleotide
gacgcggtgcgctgtggacaaggggcccgtgcgct

SEQ ID NO: 11150 - DNA, 35 bp, Artificial Sequence
  Synthetic oligonucleotide
gacggaaggagacgtcacgtaccttgatcctagag

SEQ ID NO: 11151 - DNA, 37 bp, Artificial Sequence
  Synthetic oligonucleotide
gacggtggggtgaaagatgccaaataggcgaaggtga

SEQ ID NO: 11152 - DNA, 35 bp, Artificial Sequence
  Synthetic oligonucleotide
gactagcacaaccgtacatcagaccgcgcacattt

SEQ ID NO: 11153 - DNA, 37 bp, Artificial Sequence
  Synthetic oligonucleotide
gatgcggaatgtgtcacaggaaacgagataggaaaga

SEQ ID NO: 11154 - DNA, 36 bp, Artificial Sequence
  Synthetic oligonucleotide
gcacaagccaagtgcgcgtgagtcccttcctttgga

SEQ ID NO: 11155 - DNA, 36 bp, Artificial Sequence
  Synthetic oligonucleotide
gccacaggcagaaatatcccaatcgttggccatgta

SEQ ID NO: 11156 - DNA, 36 bp, Artificial Sequence
  Synthetic oligonucleotide
gcctgccctagttagacccccgactgttctctcaaa

SEQ ID NO: 11157 - DNA, 36 bp, Artificial Sequence
  Synthetic oligonucleotide
gcgtaggcacgggctgcgtaaactcatctcaacaca

SEQ ID NO: 11158 - DNA, 35 bp, Artificial Sequence
  Synthetic oligonucleotide
gctgaatcaggacgtgcacagtcacttataactct

SEQ ID NO: 11159 - DNA, 37 bp, Artificial Sequence
  Synthetic oligonucleotide
ggacacgcaccagtctacacgcgagagctaagggaga

SEQ ID NO: 11160 - DNA, 36 bp, Artificial Sequence
  Synthetic oligonucleotide
gtaacggtgcaggtgctcaacctcttatccagttta

SEQ ID NO: 11161 - DNA, 35 bp, Artificial Sequence
  Synthetic oligonucleotide
gtcccaacggaagttatgtaccgataaccctttag

SEQ ID NO: 11162 - DNA, 36 bp, Artificial Sequence
  Synthetic oligonucleotide
gttggacccgacacggacaaggaccgacctttatta

SEQ ID NO: 11163 - DNA, 38 bp, Artificial Sequence
  Synthetic oligonucleotide
tacacgcacagacccaacgtcaggtccacatgcagtga

SEQ ID NO: 11164 - DNA, 35 bp, Artificial Sequence
  Synthetic oligonucleotide
tacccaccaccgattgcgaaagccactcatccagc

SEQ ID NO: 11165 - DNA, 37 bp, Artificial Sequence
  Synthetic oligonucleotide
tacggtcgcagttgaagagcaggctggagcaggtgga

SEQ ID NO: 11166 - DNA, 35 bp, Artificial Sequence
  Synthetic oligonucleotide
tatgccacatcgaatacgaacggcagatgataatt

SEQ ID NO: 11167 - DNA, 37 bp, Artificial Sequence
  Synthetic oligonucleotide
tcaccggtgcgcctctagaagacagtagaatattcga

SEQ ID NO: 11168 - DNA, 36 bp, Artificial Sequence
  Synthetic oligonucleotide
tccaccgagcgcaatccgacttaacataccgcctaa

SEQ ID NO: 11169 - DNA, 37 bp, Artificial Sequence
  Synthetic oligonucleotide
tctgagcccagggtggcggaaaagatcgtacagagga

SEQ ID NO: 11170 - DNA, 34 bp, Artificial Sequence
  Synthetic oligonucleotide
tgacaccggacagccacgtcgaagtatctcattc

SEQ ID NO: 11171 - DNA, 38 bp, Artificial Sequence
  Synthetic oligonucleotide
tgagtgcacatgcctccacgtgacattctcggaagtga

SEQ ID NO: 11172 - DNA, 35 bp, Artificial Sequence
  Synthetic oligonucleotide
tgatgcccgcccacatggtctatgagaaccgtacc

SEQ ID NO: 11173 - DNA, 35 bp, Artificial Sequence
  Synthetic oligonucleotide
tgatgcgcaatcacgtgaccattcgcatcagcaca

SEQ ID NO: 11174 - DNA, 38 bp, Artificial Sequence
  Synthetic oligonucleotide
ttgagcggcgcatgatctgaatcgtcctcagtagctga

SEQ ID NO: 11175 - DNA, 36 bp, Artificial Sequence
  Synthetic oligonucleotide
aaccatccagacaacaacgaggccagaagtgtcgta

SEQ ID NO: 11176 - DNA, 38 bp, Artificial Sequence
  Synthetic oligonucleotide
acaccgccaagctgttgtatcagtggctggtgagttga

SEQ ID NO: 11177 - DNA, 35 bp, Artificial Sequence
  Synthetic oligonucleotide
acctcaccccgcggtaccaccccaccacactcttg

SEQ ID NO: 11178 - DNA, 37 bp, Artificial Sequence
  Synthetic oligonucleotide
acctcatgcgcatagatccccagacgtcgaaaggtga

SEQ ID NO: 11179 - DNA, 35 bp, Artificial Sequence
  Synthetic oligonucleotide
acctgcatcagcggacagtggtaactgccagtgag

SEQ ID NO: 11180 - DNA, 36 bp, Artificial Sequence
  Synthetic oligonucleotide
atccaccctctgggagcgcaccaaggactgatgcta

SEQ ID NO: 11181 - DNA, 36 bp, Artificial Sequence
  Synthetic oligonucleotide
atgacccgcagtccggtcgaagcaagccacagggta

SEQ ID NO: 11182 - DNA, 35 bp, Artificial Sequence
  Synthetic oligonucleotide
atgcggtcaccagatgcgcatcgaactcgccatgt

SEQ ID NO: 11183 - DNA, 35 bp, Artificial Sequence
  Synthetic oligonucleotide
gaacgagctcggaatactcaaaagtaagagatcca

SEQ ID NO: 11184 - DNA, 38 bp, Artificial Sequence
  Synthetic oligonucleotide
gaagcagagggcgactcgggagacaacgcatctgttga

SEQ ID NO: 11185 - DNA, 38 bp, Artificial Sequence
  Synthetic oligonucleotide
gacacgcaagatagagtgtcacgtggggtgtccattga

SEQ ID NO: 11186 - DNA, 36 bp, Artificial Sequence
  Synthetic oligonucleotide
gacgaacgtcacataaggaccgagttatagaacaca

SEQ ID NO: 11187 - DNA, 35 bp, Artificial Sequence
  Synthetic oligonucleotide
gagacgaaaggtaggacttggcagtcttgatggat

SEQ ID NO: 11188 - DNA, 35 bp, Artificial Sequence
  Synthetic oligonucleotide
gagcaaacagcacctggtcacgaatccctctgtcc

SEQ ID NO: 11189 - DNA, 36 bp, Artificial Sequence
  Synthetic oligonucleotide
gagccaatcgcacgtgctggaggatgatctacttta

SEQ ID NO: 11190 - DNA, 36 bp, Artificial Sequence
  Synthetic oligonucleotide
gagtcagaacgcccactgacccatttgcatgtatga

SEQ ID NO: 11191 - DNA, 37 bp, Artificial Sequence
  Synthetic oligonucleotide
gataccaccgcggggagacgtactgacaggctcacga

SEQ ID NO: 11192 - DNA, 38 bp, Artificial Sequence
  Synthetic oligonucleotide
gatgcccgccggatagaagtaataacgtgtgagggtga

SEQ ID NO: 11193 - DNA, 36 bp, Artificial Sequence
  Synthetic oligonucleotide
gatgccgccggatcatgcgtcaaggatggacggaga

SEQ ID NO: 11194 - DNA, 35 bp, Artificial Sequence
  Synthetic oligonucleotide
gcacatcaccgattctcattgttacccttgggaac

SEQ ID NO: 11195 - DNA, 38 bp, Artificial Sequence
  Synthetic oligonucleotide
gcagatcaagccggtcagtcagactcgaattcacgtga

SEQ ID NO: 11196 - DNA, 35 bp, Artificial Sequence
  Synthetic oligonucleotide
gccaacgccctaccagtagccttctttttaggcga

SEQ ID NO: 11197 - DNA, 35 bp, Artificial Sequence
  Synthetic oligonucleotide
gccgaagccgggagcatgggagggagggccgaccc

SEQ ID NO: 11198 - DNA, 35 bp, Artificial Sequence
  Synthetic oligonucleotide
gcgaacatcgcagtttgctatggatctttaaatac

SEQ ID NO: 11199 - DNA, 36 bp, Artificial Sequence
  Synthetic oligonucleotide
gcgaagctaacaggagcacttgcaggaagagagcaa

SEQ ID NO: 11200 - DNA, 35 bp, Artificial Sequence
  Synthetic oligonucleotide
gcgcaaggagccaatattggacgaccctaaacacg

SEQ ID NO: 11201 - DNA, 36 bp, Artificial Sequence
  Synthetic oligonucleotide
ggacaatcggtcggacgaaacaggtgtattggggaa

SEQ ID NO: 11202 - DNA, 36 bp, Artificial Sequence
  Synthetic oligonucleotide
gggacgcaacatgtccaagggtcgcgtaactctcga

SEQ ID NO: 11203 - DNA, 35 bp, Artificial Sequence
  Synthetic oligonucleotide
gtccaaagcggtaagaagctgttggaacgtgcctt

SEQ ID NO: 11204 - DNA, 38 bp, Artificial Sequence
  Synthetic oligonucleotide
gtcgcctcgcaggcctcttgcctcatgtccttcagtga

SEQ ID NO: 11205 - DNA, 38 bp, Artificial Sequence
  Synthetic oligonucleotide
gtgacccaccgtggtggcgaagggatcacgtgcactga

SEQ ID NO: 11206 - DNA, 38 bp, Artificial Sequence
  Synthetic oligonucleotide
gtgatcgacgcatgaaaacagccccctgtgaacggtga

SEQ ID NO: 11207 - DNA, 37 bp, Artificial Sequence
  Synthetic oligonucleotide
gtgcgaagcgagctttaagacatccgacaagtgggga

SEQ ID NO: 11208 - DNA, 35 bp, Artificial Sequence
  Synthetic oligonucleotide
gtgggggcgattccagggacgtgggcacgatcata

SEQ ID NO: 11209 - DNA, 36 bp, Artificial Sequence
  Synthetic oligonucleotide
gtggtggcgaggcgaggtagcttgggacttcgtata

SEQ ID NO: 11210 - DNA, 37 bp, Artificial Sequence
  Synthetic oligonucleotide
taccaccaaaccgtcgtaagcagtccattgaattgga

SEQ ID NO: 11211 - DNA, 38 bp, Artificial Sequence
  Synthetic oligonucleotide
taccacctagaccgttagtcgacagaggctttagttga

SEQ ID NO: 11212 - DNA, 35 bp, Artificial Sequence
  Synthetic oligonucleotide
tacgtcgaaagcgcgagtaagaatgtgaggaaaga

SEQ ID NO: 11213 - DNA, 37 bp, Artificial Sequence
  Synthetic oligonucleotide
tagcaacatcgacccgacacacctcaacatcccacga

SEQ ID NO: 11214 - DNA, 37 bp, Artificial Sequence
  Synthetic oligonucleotide
tagcccggtcagggctggactgtgcaggcatgttaga

SEQ ID NO: 11215 - DNA, 36 bp, Artificial Sequence
  Synthetic oligonucleotide
tcaacaagaccgtgcgtactccagtcctaatgctga

SEQ ID NO: 11216 - DNA, 36 bp, Artificial Sequence
  Synthetic oligonucleotide
tgacgcacaagccgcttcctatagacgtacgcacca

SEQ ID NO: 11217 - DNA, 38 bp, Artificial Sequence
  Synthetic oligonucleotide
tgactagcggcagtccctcaacatggccgtccctttgg

SEQ ID NO: 11218 - DNA, 35 bp, Artificial Sequence
  Synthetic oligonucleotide
tgagccgataggtacagaaccggacagcatacggc

SEQ ID NO: 11219 - DNA, 36 bp, Artificial Sequence
  Synthetic oligonucleotide
tgccacgcaagcagtcaaagaccatcccacaattca

SEQ ID NO: 11220 - DNA, 36 bp, Artificial Sequence
  Synthetic oligonucleotide
tgccaggtcggaggatcgttcgacaacagcaatgca

SEQ ID NO: 11221 - DNA, 35 bp, Artificial Sequence
  Synthetic oligonucleotide
aacaccacacgggacgagcaggctttgagaatacc

SEQ ID NO: 11222 - DNA, 38 bp, Artificial Sequence
  Synthetic oligonucleotide
aacaccagacgaccggaagactaggaccactgccgtga

SEQ ID NO: 11223 - DNA, 34 bp, Artificial Sequence
  Synthetic oligonucleotide
aacaccggcctgggtcgttataagtaacttaggt

SEQ ID NO: 11224 - DNA, 35 bp, Artificial Sequence
  Synthetic oligonucleotide
aagcgcacccgtccgacgtgtccaccaccaaccaa

SEQ ID NO: 11225 - DNA, 35 bp, Artificial Sequence
  Synthetic oligonucleotide
acacacacgcggccaaaatgcactgtggattcacg

SEQ ID NO: 11226 - DNA, 35 bp, Artificial Sequence
  Synthetic oligonucleotide
acacccagccccggtcgttagccactgccagtaca

SEQ ID NO: 11227 - DNA, 35 bp, Artificial Sequence
  Synthetic oligonucleotide
acaccgaggcgtgtgtacgtacgggaatttgcgcc

SEQ ID NO: 11228 - DNA, 35 bp, Artificial Sequence
  Synthetic oligonucleotide
accagaagcacgcgacatatgacctatcacattgg

SEQ ID NO: 11229 - DNA, 35 bp, Artificial Sequence
  Synthetic oligonucleotide
acctgccattgctcagtgagcggtcccaatcgccg

SEQ ID NO: 11230 - DNA, 38 bp, Artificial Sequence
  Synthetic oligonucleotide
atccaagcacgctatcacctggattcttagacgtctga

SEQ ID NO: 11231 - DNA, 36 bp, Artificial Sequence
  Synthetic oligonucleotide
cagagggcgtgtgtacagatccgtttgatgtctgga

SEQ ID NO: 11232 - DNA, 36 bp, Artificial Sequence
  Synthetic oligonucleotide
gaacgtgcacgaagcatgtgaccatgcgtaagtcaa

SEQ ID NO: 11233 - DNA, 33 bp, Artificial Sequence
  Synthetic oligonucleotide
gacacagccgtacacatgcccccaacactactg

SEQ ID NO: 11234 - DNA, 37 bp, Artificial Sequence
  Synthetic oligonucleotide
gaccagccaacacctcgcacgtcataatagaccctga

SEQ ID NO: 11235 - DNA, 36 bp, Artificial Sequence
  Synthetic oligonucleotide
gacccaatcgtctcaagcgctagggacgttcgccga

SEQ ID NO: 11236 - DNA, 38 bp, Artificial Sequence
  Synthetic oligonucleotide
gacgcgctaagacattgtacctccgtcgcactgtgtga

SEQ ID NO: 11237 - DNA, 37 bp, Artificial Sequence
  Synthetic oligonucleotide
gactcaaccacagacgtcctgaggaggtccgttacga

SEQ ID NO: 11238 - DNA, 37 bp, Artificial Sequence
  Synthetic oligonucleotide
gagcacggctgcacaatacgtcggtggacttcgacga

SEQ ID NO: 11239 - DNA, 38 bp, Artificial Sequence
  Synthetic oligonucleotide
gagccggtaggcaagtccttctagaggcatctcgttga

SEQ ID NO: 11240 - DNA, 35 bp, Artificial Sequence
  Synthetic oligonucleotide
gataacagcgcgaaggtactgatacggatgttggg

SEQ ID NO: 11241 - DNA, 37 bp, Artificial Sequence
  Synthetic oligonucleotide
gatccgccgcaattggcgtataggagggtaaacttga

SEQ ID NO: 11242 - DNA, 36 bp, Artificial Sequence
  Synthetic oligonucleotide
gatgccgagaggtgccggaaagccagtcggaaagga

SEQ ID NO: 11243 - DNA, 35 bp, Artificial Sequence
  Synthetic oligonucleotide
gcaagtgcgctcaccattctatagcctgaccccgc

SEQ ID NO: 11244 - DNA, 35 bp, Artificial Sequence
  Synthetic oligonucleotide
gcacacaaacaggatgtggaacgagtagacgcgtc

SEQ ID NO: 11245 - DNA, 38 bp, Artificial Sequence
  Synthetic oligonucleotide
gcaccactaaaggaacacagctcgtcttaaccatctga

SEQ ID NO: 11246 - DNA, 36 bp, Artificial Sequence
  Synthetic oligonucleotide
gcatacgcgcatagcacttgtataagttgtaacgta

SEQ ID NO: 11247 - DNA, 36 bp, Artificial Sequence
  Synthetic oligonucleotide
gccacatcggagtgagaccccagtcttgtccgtcca

SEQ ID NO: 11248 - DNA, 35 bp, Artificial Sequence
  Synthetic oligonucleotide
gccacgccagtgatggccaaattactcttgggaac

SEQ ID NO: 11249 - DNA, 37 bp, Artificial Sequence
  Synthetic oligonucleotide
gccatgggagtgggtataggatgaaggccgagtgaga

SEQ ID NO: 11250 - DNA, 37 bp, Artificial Sequence
  Synthetic oligonucleotide
gccgccacgcctcactatcaattcgctactccgacga

SEQ ID NO: 11251 - DNA, 36 bp, Artificial Sequence
  Synthetic oligonucleotide
gcgcacacaacaacttatacgaaggaagaacgagca

SEQ ID NO: 11252 - DNA, 35 bp, Artificial Sequence
  Synthetic oligonucleotide
gctgcacccccattcccgtctagccgttccttacg

SEQ ID NO: 11253 - DNA, 35 bp, Artificial Sequence
  Synthetic oligonucleotide
ggacacaacagtgatgctggacggtcctcgagtac

SEQ ID NO: 11254 - DNA, 36 bp, Artificial Sequence
  Synthetic oligonucleotide
gtacacgccactaagagctaagcgccatcatgccta

SEQ ID NO: 11255 - DNA, 35 bp, Artificial Sequence
  Synthetic oligonucleotide
gtacagtctcgcgagcaacacacccatctacacct

SEQ ID NO: 11256 - DNA, 35 bp, Artificial Sequence
  Synthetic oligonucleotide
gtctgcgcaccgtcacacttcgaactcttatcggc

SEQ ID NO: 11257 - DNA, 38 bp, Artificial Sequence
  Synthetic oligonucleotide
gtgaccaccgctgatgaacaggaacgcgaccctgctga

SEQ ID NO: 11258 - DNA, 35 bp, Artificial Sequence
  Synthetic oligonucleotide
gtttgacgcaccatgatacgtaccgacatcattct

SEQ ID NO: 11259 - DNA, 37 bp, Artificial Sequence
  Synthetic oligonucleotide
tacatcatcagggtgagacacgcaagctgcatcagga

SEQ ID NO: 11260 - DNA, 36 bp, Artificial Sequence
  Synthetic oligonucleotide
taccaccccggtcgtccggctgtaattaacagctga

SEQ ID NO: 11261 - DNA, 35 bp, Artificial Sequence
  Synthetic oligonucleotide
tacgccacgcatgccatgtgacatttaccgcccat

SEQ ID NO: 11262 - DNA, 36 bp, Artificial Sequence
  Synthetic oligonucleotide
tacgcccgacagtcactgaccctcgcattacaccta

SEQ ID NO: 11263 - DNA, 37 bp, Artificial Sequence
  Synthetic oligonucleotide
tagtacgtgcactggtaagctaggtattttgagtaga

SEQ ID NO: 11264 - DNA, 35 bp, Artificial Sequence
  Synthetic oligonucleotide
tcaacgccctattcgtcatgacccaatatttacac

SEQ ID NO: 11265 - DNA, 36 bp, Artificial Sequence
  Synthetic oligonucleotide
tccaatcagtagtacaggtgtcatgccaacttcaca

SEQ ID NO: 11266 - DNA, 35 bp, Artificial Sequence
  Synthetic oligonucleotide
tccacgacaggaagtcaagcccatgaggaatcgag

SEQ ID NO: 11267 - DNA, 35 bp, Artificial Sequence
  Synthetic oligonucleotide
tgacgcccaacgcacgtattggctgtgtgccattc

SEQ ID NO: 11268 - DNA, 35 bp, Artificial Sequence
  Synthetic oligonucleotide
tgatgcggacaaatgagggatggcgagtcgagttg

SEQ ID NO: 11269 - DNA, 36 bp, Artificial Sequence
  Synthetic oligonucleotide
tgcgacgaaggatcggtcacagaagacgggtggtta

SEQ ID NO: 11270 - DNA, 38 bp, Artificial Sequence
  Synthetic oligonucleotide
tgcgtaacaacaactatgcgggcacacgtagacactga

SEQ ID NO: 11271 - DNA, 36 bp, Artificial Sequence
  Synthetic oligonucleotide
tgtcaccccgcatggtcctcactgaatgcacctaga

SEQ ID NO: 11272 - DNA, 38 bp, Artificial Sequence
  Synthetic oligonucleotide
aaccagccatcatgctatccctgacactcgagcggtga

SEQ ID NO: 11273 - DNA, 37 bp, Artificial Sequence
  Synthetic oligonucleotide
aacgagcaagtagacggaatagggaggaccgttcgga

SEQ ID NO: 11274 - DNA, 36 bp, Artificial Sequence
  Synthetic oligonucleotide
aacgcacaacccggctggaatgctccaataagatta

SEQ ID NO: 11275 - DNA, 35 bp, Artificial Sequence
  Synthetic oligonucleotide
aacgcacgccaagggagactaggtatgcgtaacac

SEQ ID NO: 11276 - DNA, 37 bp, Artificial Sequence
  Synthetic oligonucleotide
acaacgccggtggtgcactagccaggatctagtcgga

SEQ ID NO: 11277 - DNA, 36 bp, Artificial Sequence
  Synthetic oligonucleotide
acaagtcgccgagcagttatgacactgtcgtgacgc

SEQ ID NO: 11278 - DNA, 36 bp, Artificial Sequence
  Synthetic oligonucleotide
acacgaccaaacgtaggcacgagaggtcaggctaga

SEQ ID NO: 11279 - DNA, 38 bp, Artificial Sequence
  Synthetic oligonucleotide
accacgcgcatggtgaaaccctcaagtccgtttgctga

SEQ ID NO: 11280 - DNA, 37 bp, Artificial Sequence
  Synthetic oligonucleotide
accatcgccgggtccatcctttagtccagccgtaaga

SEQ ID NO: 11281 - DNA, 35 bp, Artificial Sequence
  Synthetic oligonucleotide
accccgaaacatatcgtctaacaacattccccgtt

SEQ ID NO: 11282 - DNA, 36 bp, Artificial Sequence
  Synthetic oligonucleotide
acccggtcggaagcatataccaaaaccttatgtgca

SEQ ID NO: 11283 - DNA, 37 bp, Artificial Sequence
  Synthetic oligonucleotide
actcaccgcaacatgcataagagagctgcatctgtga

SEQ ID NO: 11284 - DNA, 35 bp, Artificial Sequence
  Synthetic oligonucleotide
agcacagccctatcacgtctaccttgtcaggcaag

SEQ ID NO: 11285 - DNA, 36 bp, Artificial Sequence
  Synthetic oligonucleotide
atcaccacccatacacaaccagagacatcgttgaga

SEQ ID NO: 11286 - DNA, 34 bp, Artificial Sequence
  Synthetic oligonucleotide
atccgcacgaacagcaagaagttgcctggtcgca

SEQ ID NO: 11287 - DNA, 37 bp, Artificial Sequence
  Synthetic oligonucleotide
gaaacaccaccaaatggcaataaggcctaagcgttga

SEQ ID NO: 11288 - DNA, 36 bp, Artificial Sequence
  Synthetic oligonucleotide
gaactgcgcgagcaattagaatgatagaatatcata

SEQ ID NO: 11289 - DNA, 38 bp, Artificial Sequence
  Synthetic oligonucleotide
gacaccgggttgcacgctgatccgggccgggaaactga

SEQ ID NO: 11290 - DNA, 35 bp, Artificial Sequence
  Synthetic oligonucleotide
gacacgaactgggaccctggagacgctggcatgca

SEQ ID NO: 11291 - DNA, 38 bp, Artificial Sequence
  Synthetic oligonucleotide
gaccacgcagtacatgttcctatacagaactattatga

SEQ ID NO: 11292 - DNA, 35 bp, Artificial Sequence
  Synthetic oligonucleotide
gaccactgtcggaagcataccctaaactcacacac

SEQ ID NO: 11293 - DNA, 35 bp, Artificial Sequence
  Synthetic oligonucleotide
gaccaggcgtacattggcagtctgcacaccaaact

SEQ ID NO: 11294 - DNA, 38 bp, Artificial Sequence
  Synthetic oligonucleotide
gacgagctgagcgagaacgcaagagcgaccctaactga

SEQ ID NO: 11295 - DNA, 36 bp, Artificial Sequence
  Synthetic oligonucleotide
gacgagtccaaccgtctttagaaccgccacacaaca

SEQ ID NO: 11296 - DNA, 35 bp, Artificial Sequence
  Synthetic oligonucleotide
gacgcacccattcggcccaccacacccttaaaggt

SEQ ID NO: 11297 - DNA, 38 bp, Artificial Sequence
  Synthetic oligonucleotide
gacgcgacgacgtctcactcacggtctgtccctcctga

SEQ ID NO: 11298 - DNA, 35 bp, Artificial Sequence
  Synthetic oligonucleotide
gacggagtcacagctgtagtcccgataatataggt

SEQ ID NO: 11299 - DNA, 35 bp, Artificial Sequence
  Synthetic oligonucleotide
gacgtgacgaagggtcggtacagcagaggctcaca

SEQ ID NO: 11300 - DNA, 35 bp, Artificial Sequence
  Synthetic oligonucleotide
gagtgcgcacgaacgctcagagccctattccaatc

SEQ ID NO: 11301 - DNA, 36 bp, Artificial Sequence
  Synthetic oligonucleotide
gatagccgacggaatctgaatacgcctggttaaaga

SEQ ID NO: 11302 - DNA, 38 bp, Artificial Sequence
  Synthetic oligonucleotide
gatccagggggcggatacgtagccatgggaagttctga

SEQ ID NO: 11303 - DNA, 36 bp, Artificial Sequence
  Synthetic oligonucleotide
gcaacggtaagggcacgttaattcagtctgcgaaaa

SEQ ID NO: 11304 - DNA, 36 bp, Artificial Sequence
  Synthetic oligonucleotide
gcatcacacgggaaagtcgaggtaccagctgaccga

SEQ ID NO: 11305 - DNA, 35 bp, Artificial Sequence
  Synthetic oligonucleotide
gccaaaccatcggaacgtgttaagacctaacgcga

SEQ ID NO: 11306 - DNA, 38 bp, Artificial Sequence
  Synthetic oligonucleotide
ggaccaaccgggagcagttcatgctgacggacatgtga

SEQ ID NO: 11307 - DNA, 35 bp, Artificial Sequence
  Synthetic oligonucleotide
ggtggacacacgttcaggctactgtagcgcatgct

SEQ ID NO: 11308 - DNA, 37 bp, Artificial Sequence
  Synthetic oligonucleotide
gtgagcaacacttactatggaaacagggctataacga

SEQ ID NO: 11309 - DNA, 38 bp, Artificial Sequence
  Synthetic oligonucleotide
gtgcactcagaggggcgacacctgcccgttacgcgtga

SEQ ID NO: 11310 - DNA, 37 bp, Artificial Sequence
  Synthetic oligonucleotide
tacgttgagcaggtagacggtgcagagacatttagga

SEQ ID NO: 11311 - DNA, 37 bp, Artificial Sequence
  Synthetic oligonucleotide
tcaacgtccgtgcgactaatatgacgaatgagaatga

SEQ ID NO: 11312 - DNA, 36 bp, Artificial Sequence
  Synthetic oligonucleotide
tcacagccaagatgaagatattgggtgcactaagaa

SEQ ID NO: 11313 - DNA, 35 bp, Artificial Sequence
  Synthetic oligonucleotide
tcaccccagtgacaaaccttatgagatgcgttgca

SEQ ID NO: 11314 - DNA, 37 bp, Artificial Sequence
  Synthetic oligonucleotide
tcacgcccatacatgtagcagtagacacgttgggaga

SEQ ID NO: 11315 - DNA, 35 bp, Artificial Sequence
  Synthetic oligonucleotide
tcatgcccacgcataagcaatgttccgcctccacg

SEQ ID NO: 11316 - DNA, 35 bp, Artificial Sequence
  Synthetic oligonucleotide
tccatcccacatgcccctcgatgtgccgaagggtg

SEQ ID NO: 11317 - DNA, 36 bp, Artificial Sequence
  Synthetic oligonucleotide
tgccgcccacaacgggagcagagcctctgactggca

SEQ ID NO: 11318 - DNA, 36 bp, Artificial Sequence
  Synthetic oligonucleotide
aacaccagcaggttatcttctgaccccgctcctcta

SEQ ID NO: 11319 - DNA, 35 bp, Artificial Sequence
  Synthetic oligonucleotide
aacacgcacgcacatgttgactcaccgtttcttaa

SEQ ID NO: 11320 - DNA, 38 bp, Artificial Sequence
  Synthetic oligonucleotide
acagcaaccggctggtagttataaggtcctgcaagtga

SEQ ID NO: 11321 - DNA, 37 bp, Artificial Sequence
  Synthetic oligonucleotide
acccacgcagacatctgggagaagcggacgtggctga

SEQ ID NO: 11322 - DNA, 36 bp, Artificial Sequence
  Synthetic oligonucleotide
accgcaacacgtgccattggaataaagttgtcgcca

SEQ ID NO: 11323 - DNA, 35 bp, Artificial Sequence
  Synthetic oligonucleotide
actcgccaacagatctcggccccttatcctggtcg

SEQ ID NO: 11324 - DNA, 36 bp, Artificial Sequence
  Synthetic oligonucleotide
agcggtccaacgcaaggaaacgtagaagctatgcta

SEQ ID NO: 11325 - DNA, 38 bp, Artificial Sequence
  Synthetic oligonucleotide
atacaccgcagattacagcggagcgtcaaatacggtga

SEQ ID NO: 11326 - DNA, 35 bp, Artificial Sequence
  Synthetic oligonucleotide
atccacgccaccgaattgaaaggtaagacgcgcag

SEQ ID NO: 11327 - DNA, 36 bp, Artificial Sequence
  Synthetic oligonucleotide
atgcacacagttgggtaccagtttggttgcgtgtta

SEQ ID NO: 11328 - DNA, 35 bp, Artificial Sequence
  Synthetic oligonucleotide
atgccatcgcagagtacggggtgcctcaggatcgg

SEQ ID NO: 11329 - DNA, 37 bp, Artificial Sequence
  Synthetic oligonucleotide
atggccacaaggtcgaaccacgctaatcgaaaactga

SEQ ID NO: 11330 - DNA, 35 bp, Artificial Sequence
  Synthetic oligonucleotide
gaatcagcaaccaagtcggtgtgtcgaaggataac

SEQ ID NO: 11331 - DNA, 38 bp, Artificial Sequence
  Synthetic oligonucleotide
gacaacgccagccagtatgctctgacatcgtccactga

SEQ ID NO: 11332 - DNA, 35 bp, Artificial Sequence
  Synthetic oligonucleotide
gacaagccacaatcccccaatcaagacccaaatcg

SEQ ID NO: 11333 - DNA, 38 bp, Artificial Sequence
  Synthetic oligonucleotide
gacaccgggcgttcgggtgttgaaacgttatccagtga

SEQ ID NO: 11334 - DNA, 35 bp, Artificial Sequence
  Synthetic oligonucleotide
gacccctacacatatcgctagaaaggatcccattt

SEQ ID NO: 11335 - DNA, 35 bp, Artificial Sequence
  Synthetic oligonucleotide
gacgacggcgaatggactgaggaccagttagattt

SEQ ID NO: 11336 - DNA, 35 bp, Artificial Sequence
  Synthetic oligonucleotide
gacgacgtacgggggttagacatggggaggacacg

SEQ ID NO: 11337 - DNA, 38 bp, Artificial Sequence
  Synthetic oligonucleotide
gactcgctgtgaggacgtaaaaagcggctaagacctga

SEQ ID NO: 11338 - DNA, 37 bp, Artificial Sequence
  Synthetic oligonucleotide
gagtacgcagtagggtaagacgttcatcggaggctga

SEQ ID NO: 11339 - DNA, 35 bp, Artificial Sequence
  Synthetic oligonucleotide
gagtgccacatcagcaatgtagtaaggacagtggg

SEQ ID NO: 11340 - DNA, 35 bp, Artificial Sequence
  Synthetic oligonucleotide
gatcgcccccgtgtgaaaatggctgttactctgcg

SEQ ID NO: 11341 - DNA, 37 bp, Artificial Sequence
  Synthetic oligonucleotide
gatgcgagccaacgtgtccgctaaacccatatcggga

SEQ ID NO: 11342 - DNA, 35 bp, Artificial Sequence
  Synthetic oligonucleotide
gcacatcgcactcgacattaaatgcccgacaccat

SEQ ID NO: 11343 - DNA, 35 bp, Artificial Sequence
  Synthetic oligonucleotide
gcaccaacgcctacctaaggaccgacatcaagtgg

SEQ ID NO: 11344 - DNA, 36 bp, Artificial Sequence
  Synthetic oligonucleotide
gccacacgcctaatccgtcgagcaagcaacataaga

SEQ ID NO: 11345 - DNA, 38 bp, Artificial Sequence
  Synthetic oligonucleotide
gccacagcgcgcgtactgtatgtagttgtataccatga

SEQ ID NO: 11346 - DNA, 35 bp, Artificial Sequence
  Synthetic oligonucleotide
gccaggtaggcatcccaaatcgtattccagtacgg

SEQ ID NO: 11347 - DNA, 37 bp, Artificial Sequence
  Synthetic oligonucleotide
gccccgtccaggttggtatgccaggagctacacatca

SEQ ID NO: 11348 - DNA, 36 bp, Artificial Sequence
  Synthetic oligonucleotide
gcgaacccctctgaaccttagataactcgtgcccga

SEQ ID NO: 11349 - DNA, 36 bp, Artificial Sequence
  Synthetic oligonucleotide
gctgcccaccccagtataccgtcaccagaccggaaa

SEQ ID NO: 11350 - DNA, 37 bp, Artificial Sequence
  Synthetic oligonucleotide
ggaccaaccaaatgacgtgacgtagcggtgagtccga

SEQ ID NO: 11351 - DNA, 35 bp, Artificial Sequence
  Synthetic oligonucleotide
gtcacccgcacgacgaatgatagcctggggtaagg

SEQ ID NO: 11352 - DNA, 35 bp, Artificial Sequence
  Synthetic oligonucleotide
gtgcgggtcggccacacggtatgaggctagtacag

SEQ ID NO: 11353 - DNA, 36 bp, Artificial Sequence
  Synthetic oligonucleotide
tacgcatgggtcatgcattattacagaccgtcgcta

SEQ ID NO: 11354 - DNA, 35 bp, Artificial Sequence
  Synthetic oligonucleotide
tcaaccgccaggtgcttcaacggaggccgcttggg

SEQ ID NO: 11355 - DNA, 38 bp, Artificial Sequence
  Synthetic oligonucleotide
tcacgcacgcctcaccacaagggccgtacattacgtga

SEQ ID NO: 11356 - DNA, 38 bp, Artificial Sequence
  Synthetic oligonucleotide
tcatgccggtatgatgttgcgcgtctacttatggatga

SEQ ID NO: 11357 - DNA, 35 bp, Artificial Sequence
  Synthetic oligonucleotide
tccagcacgacgggtgtatctgtgagttggtgccc

SEQ ID NO: 11358 - DNA, 36 bp, Artificial Sequence
  Synthetic oligonucleotide
tgcacagtcacgctatctgagtgaaggcctaccgta

SEQ ID NO: 11359 - DNA, 38 bp, Artificial Sequence
  Synthetic oligonucleotide
tgcactgtccgcggtgatggagtaccgtcacgttctga

SEQ ID NO: 11360 - DNA, 35 bp, Artificial Sequence
  Synthetic oligonucleotide
tgtgcccgtcccctgaattagtaggaatcaaccaa

SEQ ID NO: 11361 - DNA, 38 bp, Artificial Sequence
  Synthetic oligonucleotide
tgttgcataggagggaacggtgtgtacacaaaagtaga

SEQ ID NO: 11362 - DNA, 38 bp, Artificial Sequence
  Synthetic oligonucleotide
ttacgccccggtaagaagtacgaggacaccgtggttga

SEQ ID NO: 11363 - DNA, 36 bp, Artificial Sequence
  Synthetic oligonucleotide
ttggccgacatagggctaacaacgcttatcttccta

SEQ ID NO: 11364 - DNA, 38 bp, Artificial Sequence
  Synthetic oligonucleotide
aacgccgtgagagtacccagtctgtttggttcccgtga

SEQ ID NO: 11365 - DNA, 36 bp, Artificial Sequence
  Synthetic oligonucleotide
aacgctgcaggcactctcacttaactcttatgatca

SEQ ID NO: 11366 - DNA, 38 bp, Artificial Sequence
  Synthetic oligonucleotide
acacccgtagctgctggggactcagctagtgaccctga

SEQ ID NO: 11367 - DNA, 37 bp, Artificial Sequence
  Synthetic oligonucleotide
acccgctgctgcaccacctttcacagtcgtaaactga

SEQ ID NO: 11368 - DNA, 36 bp, Artificial Sequence
  Synthetic oligonucleotide
acgccgtggggttgctgcttgaactccataagggga

SEQ ID NO: 11369 - DNA, 35 bp, Artificial Sequence
  Synthetic oligonucleotide
actccccgcgcagaaagtccagttcatacgtgtga

SEQ ID NO: 11370 - DNA, 38 bp, Artificial Sequence
  Synthetic oligonucleotide
atcgaccacatcccctgtttgttgtgaaggttctgtga

SEQ ID NO: 11371 - DNA, 36 bp, Artificial Sequence
  Synthetic oligonucleotide
atgaccgcattgcaccgggctacgtgacgcgccata

SEQ ID NO: 11372 - DNA, 35 bp, Artificial Sequence
  Synthetic oligonucleotide
atgcccgcacagtcgagtgttccgctgatcctatt

SEQ ID NO: 11373 - DNA, 35 bp, Artificial Sequence
  Synthetic oligonucleotide
atgcgccgtcaaccgtttcttctccaacactcctc

SEQ ID NO: 11374 - DNA, 38 bp, Artificial Sequence
  Synthetic oligonucleotide
gacacatgcgcacggaggtgtgaaaggaatccggttga

SEQ ID NO: 11375 - DNA, 37 bp, Artificial Sequence
  Synthetic oligonucleotide
gacacgaaactggttacgcttagcttggaaccaaaga

SEQ ID NO: 11376 - DNA, 38 bp, Artificial Sequence
  Synthetic oligonucleotide
gacacgtggagagtggagtggacattcactcagactga

SEQ ID NO: 11377 - DNA, 37 bp, Artificial Sequence
  Synthetic oligonucleotide
gacgacgaacgtgagtatctggtgtcacagacgagga

SEQ ID NO: 11378 - DNA, 35 bp, Artificial Sequence
  Synthetic oligonucleotide
gacgagccgatgggagacgtgacgttcagtttgaa

SEQ ID NO: 11379 - DNA, 37 bp, Artificial Sequence
  Synthetic oligonucleotide
gacgagctggaacgtaccgactggtggtaaacattga

SEQ ID NO: 11380 - DNA, 35 bp, Artificial Sequence
  Synthetic oligonucleotide
gacgccaccctgaacgacgcactccactaacctgt

SEQ ID NO: 11381 - DNA, 38 bp, Artificial Sequence
  Synthetic oligonucleotide
gacgccaggtgcataaggagtgtggtgaatgtgggtga

SEQ ID NO: 11382 - DNA, 35 bp, Artificial Sequence
  Synthetic oligonucleotide
gacgccatccatacggggacagttatgcaaaccgt

SEQ ID NO: 11383 - DNA, 36 bp, Artificial Sequence
  Synthetic oligonucleotide
gacggagtcacgcaaactctaatgcagaaaacttaa

SEQ ID NO: 11384 - DNA, 37 bp, Artificial Sequence
  Synthetic oligonucleotide
gacgtggatccagatatgggtatagtgctactaccga

SEQ ID NO: 11385 - DNA, 38 bp, Artificial Sequence
  Synthetic oligonucleotide
gactgacgccaactgccgataatagacacattgaatga

SEQ ID NO: 11386 - DNA, 36 bp, Artificial Sequence
  Synthetic oligonucleotide
gactggtggcatgctcacggtacttacttctccgaa

SEQ ID NO: 11387 - DNA, 38 bp, Artificial Sequence
  Synthetic oligonucleotide
gagcacacgattcgtaaacactatcccggtgaccttga

SEQ ID NO: 11388 - DNA, 35 bp, Artificial Sequence
  Synthetic oligonucleotide
gatgcatgaagtcgaaagtggcgataaggcatagt

SEQ ID NO: 11389 - DNA, 34 bp, Artificial Sequence
  Synthetic oligonucleotide
gcacatcaggaacacactatcccgcccgcgccct

SEQ ID NO: 11390 - DNA, 37 bp, Artificial Sequence
  Synthetic oligonucleotide
gcatacactgcgggggtccccaggcctacgcttacga

SEQ ID NO: 11391 - DNA, 38 bp, Artificial Sequence
  Synthetic oligonucleotide
gcattacgcagacaacggtacgtaggattagggtgtga

SEQ ID NO: 11392 - DNA, 35 bp, Artificial Sequence
  Synthetic oligonucleotide
gccaacgcgaccgacaaacacgtccaaccccctcc

SEQ ID NO: 11393 - DNA, 36 bp, Artificial Sequence
  Synthetic oligonucleotide
ggacacaacaccatacctgtccaaaccacagtccga

SEQ ID NO: 11394 - DNA, 36 bp, Artificial Sequence
  Synthetic oligonucleotide
ggaccaacaggaggcgtaacgagatcgtcattcgta

SEQ ID NO: 11395 - DNA, 35 bp, Artificial Sequence
  Synthetic oligonucleotide
gttgagcacatgcgtggggtattgttcagttgcct

SEQ ID NO: 11396 - DNA, 36 bp, Artificial Sequence
  Synthetic oligonucleotide
gttgcacagcgacggccttgtatagtaacgcatgta

SEQ ID NO: 11397 - DNA, 37 bp, Artificial Sequence
  Synthetic oligonucleotide
tacaacgcagtgactaattccgtgttgacgttgcaga

SEQ ID NO: 11398 - DNA, 37 bp, Artificial Sequence
  Synthetic oligonucleotide
tacaacggccgaagtgtcgagaagttcgaggaagaga

SEQ ID NO: 11399 - DNA, 36 bp, Artificial Sequence
  Synthetic oligonucleotide
tactagccccagcccgtagcgctcgttacacctgca

SEQ ID NO: 11400 - DNA, 36 bp, Artificial Sequence
  Synthetic oligonucleotide
tcaacgcgcacactacgccttccagcagtaccggta

SEQ ID NO: 11401 - DNA, 35 bp, Artificial Sequence
  Synthetic oligonucleotide
tcacacgccggactatgagtcaaatcgatagacgt

SEQ ID NO: 11402 - DNA, 35 bp, Artificial Sequence
  Synthetic oligonucleotide
tcaccaccccatactttcccatcagaaccagcccg

SEQ ID NO: 11403 - DNA, 37 bp, Artificial Sequence
  Synthetic oligonucleotide
tcaccacgcacgtacgcgatacgtggtctcttaacga

SEQ ID NO: 11404 - DNA, 36 bp, Artificial Sequence
  Synthetic oligonucleotide
tcaccgagggcatgaggggggacttcttgatccgaa

SEQ ID NO: 11405 - DNA, 35 bp, Artificial Sequence
  Synthetic oligonucleotide
tcacgcaggccctgtacacacttgtaccacctact

SEQ ID NO: 11406 - DNA, 37 bp, Artificial Sequence
  Synthetic oligonucleotide
tccaccacctcgatcgcatggcgtctatctcctcgga

SEQ ID NO: 11407 - DNA, 37 bp, Artificial Sequence
  Synthetic oligonucleotide
tcccaacgatatcgcgggttgcgacactctgactcga

SEQ ID NO: 11408 - DNA, 35 bp, Artificial Sequence
  Synthetic oligonucleotide
tgaccgggacggggaaaaagccgtaaaactgaagc

SEQ ID NO: 11409 - DNA, 38 bp, Artificial Sequence
  Synthetic oligonucleotide
tgacgcacggagtctcaggcgatacttcagacagctga

SEQ ID NO: 11410 - DNA, 37 bp, Artificial Sequence
  Synthetic oligonucleotide
tgatccacacagggcactcgagcacatcgccttggga

SEQ ID NO: 11411 - DNA, 35 bp, Artificial Sequence
  Synthetic oligonucleotide
tgccaaccagatgtacttagcctctcgctccttcg

SEQ ID NO: 11412 - DNA, 36 bp, Artificial Sequence
  Synthetic oligonucleotide
aaccagtccgatctgtggtaccgtactctagtgaaa

SEQ ID NO: 11413 - DNA, 38 bp, Artificial Sequence
  Synthetic oligonucleotide
acaacgcaaagggggctttatagtgctggcatgattga

SEQ ID NO: 11414 - DNA, 36 bp, Artificial Sequence
  Synthetic oligonucleotide
acaccatgctcacacgtcgtggatagtagcacatga

SEQ ID NO: 11415 - DNA, 38 bp, Artificial Sequence
  Synthetic oligonucleotide
acacccacacgtaggattcaacgcgttctacgcagtga

SEQ ID NO: 11416 - DNA, 35 bp, Artificial Sequence
  Synthetic oligonucleotide
acattgcgcagaagtccgctattactaattactgt

SEQ ID NO: 11417 - DNA, 37 bp, Artificial Sequence
  Synthetic oligonucleotide
accaaacgccaccacgcgcctcgcgaaaccgttacga

SEQ ID NO: 11418 - DNA, 37 bp, Artificial Sequence
  Synthetic oligonucleotide
accgatggagggacgtacaatccggtgacatctacga

SEQ ID NO: 11419 - DNA, 36 bp, Artificial Sequence
  Synthetic oligonucleotide
acgaccaccacattccgttacatcgcctgcaaatga

SEQ ID NO: 11420 - DNA, 35 bp, Artificial Sequence
  Synthetic oligonucleotide
actgccaaacgcaaacaagacgactcaatccggta

SEQ ID NO: 11421 - DNA, 38 bp, Artificial Sequence
  Synthetic oligonucleotide
actgcgcacaactcctcttacgaatccctcaggcgtga

SEQ ID NO: 11422 - DNA, 35 bp, Artificial Sequence
  Synthetic oligonucleotide
agtccgagcgccatcgttattccctcaatccatcc

SEQ ID NO: 11423 - DNA, 35 bp, Artificial Sequence
  Synthetic oligonucleotide
atcgtgaggccgaaaggtttagcgtgtgatgtcgc

SEQ ID NO: 11424 - DNA, 38 bp, Artificial Sequence
  Synthetic oligonucleotide
caccagtggtacgcgtgatgatatcgggttcgacatga

SEQ ID NO: 11425 - DNA, 35 bp, Artificial Sequence
  Synthetic oligonucleotide
cgatgcgcagatgttgacgtgtgttacgattactc

SEQ ID NO: 11426 - DNA, 35 bp, Artificial Sequence
  Synthetic oligonucleotide
gacaaaacgtccagcacactgaccccgccagttta

SEQ ID NO: 11427 - DNA, 35 bp, Artificial Sequence
  Synthetic oligonucleotide
gacaacacgcagttcccgtaccctaccgctcctgt

SEQ ID NO: 11428 - DNA, 37 bp, Artificial Sequence
  Synthetic oligonucleotide
gacacatgcaggatcggtttgagacgcgcttaacgga

SEQ ID NO: 11429 - DNA, 36 bp, Artificial Sequence
  Synthetic oligonucleotide
gacaccccagtccaccatagctccctttactgtcaa

SEQ ID NO: 11430 - DNA, 35 bp, Artificial Sequence
  Synthetic oligonucleotide
gacgacatgtcgtacagcaatggtggcattctgag

SEQ ID NO: 11431 - DNA, 38 bp, Artificial Sequence
  Synthetic oligonucleotide
gacgagcggtcgatccactaagcagtatgaggctttga

SEQ ID NO: 11432 - DNA, 37 bp, Artificial Sequence
  Synthetic oligonucleotide
gagagccgaaggtgtgtcgggagcgagacgaaactga

SEQ ID NO: 11433 - DNA, 38 bp, Artificial Sequence
  Synthetic oligonucleotide
gagagccggtcacgaggtacgctcggtgacgtaactga

SEQ ID NO: 11434 - DNA, 36 bp, Artificial Sequence
  Synthetic oligonucleotide
gatccgccgcacagaggtaatggtcgtcaacgctca

SEQ ID NO: 11435 - DNA, 36 bp, Artificial Sequence
  Synthetic oligonucleotide
gcacacagggtggggttgctcagttttacagaacta

SEQ ID NO: 11436 - DNA, 35 bp, Artificial Sequence
  Synthetic oligonucleotide
gcaccgaccgaacgcgatagcacgccgctaccata

SEQ ID NO: 11437 - DNA, 38 bp, Artificial Sequence
  Synthetic oligonucleotide
gcaccgcaggggggatctatgctatacgggaggcatga

SEQ ID NO: 11438 - DNA, 35 bp, Artificial Sequence
  Synthetic oligonucleotide
gccaaaccaggcgtataagacttacaggccgtcga

SEQ ID NO: 11439 - DNA, 36 bp, Artificial Sequence
  Synthetic oligonucleotide
gccacactcaggaagcggaacgagacacagccacaa

SEQ ID NO: 11440 - DNA, 38 bp, Artificial Sequence
  Synthetic oligonucleotide
gccacaggagctgtactagttgtctacggctggcctga

SEQ ID NO: 11441 - DNA, 37 bp, Artificial Sequence
  Synthetic oligonucleotide
gccgcaggcatatgatgcttaaacggacactgggtga

SEQ ID NO: 11442 - DNA, 37 bp, Artificial Sequence
  Synthetic oligonucleotide
gcgacggtgcataggttatggaggtgggtcggggaga

SEQ ID NO: 11443 - DNA, 35 bp, Artificial Sequence
  Synthetic oligonucleotide
gcgtgcgtgacagataccccgttagtcgttccggt

SEQ ID NO: 11444 - DNA, 37 bp, Artificial Sequence
  Synthetic oligonucleotide
gtcacacctcagctcagacccccagacattctgtcaa

SEQ ID NO: 11445 - DNA, 37 bp, Artificial Sequence
  Synthetic oligonucleotide
gtcacatccacaacccatacacagctcatgaccttga

SEQ ID NO: 11446 - DNA, 38 bp, Artificial Sequence
  Synthetic oligonucleotide
gtcgatgcaactggatttcgcgtggtatcatcacatga

SEQ ID NO: 11447 - DNA, 36 bp, Artificial Sequence
  Synthetic oligonucleotide
gtgcaccagccagagcatcgtaaaggtaggtctcaa

SEQ ID NO: 11448 - DNA, 38 bp, Artificial Sequence
  Synthetic oligonucleotide
gtggagcggggtcgcaatggatagtgcgagtatgttga

SEQ ID NO: 11449 - DNA, 37 bp, Artificial Sequence
  Synthetic oligonucleotide
tagaccgcgccgacgactgtgttactaggcctgagga

SEQ ID NO: 11450 - DNA, 35 bp, Artificial Sequence
  Synthetic oligonucleotide
tcatgcaccacaaacaccacagcacgcactgggag

SEQ ID NO: 11451 - DNA, 38 bp, Artificial Sequence
  Synthetic oligonucleotide
tccacgcggtccatcgccaacctgtcacatttggctga

SEQ ID NO: 11452 - DNA, 38 bp, Artificial Sequence
  Synthetic oligonucleotide
tcccgcccgggaacagtgtgagtataaagtcgagttga

SEQ ID NO: 11453 - DNA, 36 bp, Artificial Sequence
  Synthetic oligonucleotide
tgaatgcacaggaggaaggaacagtgtgttaacaga

SEQ ID NO: 11454 - DNA, 36 bp, Artificial Sequence
  Synthetic oligonucleotide
tgacaccgcaatatccccctcgaataagaacacaca

SEQ ID NO: 11455 - DNA, 37 bp, Artificial Sequence
  Synthetic oligonucleotide
tgacacgtgtgagtaaaaacgagtgcgcctatcgaga

SEQ ID NO: 11456 - DNA, 36 bp, Artificial Sequence
  Synthetic oligonucleotide
tgacccgacgctacagtgcatacagcccatcattga

SEQ ID NO: 11457 - DNA, 35 bp, Artificial Sequence
  Synthetic oligonucleotide
ttgaccgcggacggtaaagcgacacgagagagcgt

SEQ ID NO: 11458 - DNA, 38 bp, Artificial Sequence
  Synthetic oligonucleotide
aaccgaggagtcgagcagggtgtagccgaacgcggtga

SEQ ID NO: 11459 - DNA, 35 bp, Artificial Sequence
  Synthetic oligonucleotide
aacgcggaacagtagctggtctaaggtgagctttg

SEQ ID NO: 11460 - DNA, 36 bp, Artificial Sequence
  Synthetic oligonucleotide
aacgtgcaacgcaatcgaccaatcatacaggtttca

SEQ ID NO: 11461 - DNA, 36 bp, Artificial Sequence
  Synthetic oligonucleotide
acaccgcggtccctggggagacgacaatggtcagca

SEQ ID NO: 11462 - DNA, 38 bp, Artificial Sequence
  Synthetic oligonucleotide
acccgaccgacgccagagggactttctgtagtgcttga

SEQ ID NO: 11463 - DNA, 37 bp, Artificial Sequence
  Synthetic oligonucleotide
accgcgtgcaccaaacgtgtgtggaagtgagggttga

SEQ ID NO: 11464 - DNA, 38 bp, Artificial Sequence
  Synthetic oligonucleotide
acgacacacagaaagttgttagcccagccacggtgtga

SEQ ID NO: 11465 - DNA, 37 bp, Artificial Sequence
  Synthetic oligonucleotide
acgtgccctacgtgtcccaacgcgtggtggctgaaga

SEQ ID NO: 11466 - DNA, 37 bp, Artificial Sequence
  Synthetic oligonucleotide
atcgaggacgcacacgtaggttgtcgtgatcgtagga

SEQ ID NO: 11467 - DNA, 37 bp, Artificial Sequence
  Synthetic oligonucleotide
attcacgcaggtcggcctcccgtcgattgtcgaggga

SEQ ID NO: 11468 - DNA, 35 bp, Artificial Sequence
  Synthetic oligonucleotide
cgcgataccgaattgcggtgtacaagtgaattgct

SEQ ID NO: 11469 - DNA, 36 bp, Artificial Sequence
  Synthetic oligonucleotide
gaacacgaagagcaggtgttaggcggtctgaacgga

SEQ ID NO: 11470 - DNA, 36 bp, Artificial Sequence
  Synthetic oligonucleotide
gacacccagcaggatcatctcgcacatacccggtca

SEQ ID NO: 11471 - DNA, 37 bp, Artificial Sequence
  Synthetic oligonucleotide
gacactgcaacatggatatcgagctaaccacgacgga

SEQ ID NO: 11472 - DNA, 35 bp, Artificial Sequence
  Synthetic oligonucleotide
gacgacaagaactgagttgtggaggtgaggattga

SEQ ID NO: 11473 - DNA, 38 bp, Artificial Sequence
  Synthetic oligonucleotide
gacgcaatcctggccatcgtatgcaagttcattggtga

SEQ ID NO: 11474 - DNA, 36 bp, Artificial Sequence
  Synthetic oligonucleotide
gacgccgagaaggcgttgtacggaggtctaataaca

SEQ ID NO: 11475 - DNA, 36 bp, Artificial Sequence
  Synthetic oligonucleotide
gacggagcagacatgtgacttctatcgtaatatcta

SEQ ID NO: 11476 - DNA, 37 bp, Artificial Sequence
  Synthetic oligonucleotide
gatgccatgccagattcgaatgcggatacacgcgaga

SEQ ID NO: 11477 - DNA, 38 bp, Artificial Sequence
  Synthetic oligonucleotide
gcaaggtcggaaggcctgcacgaacgggcacacaatga

SEQ ID NO: 11478 - DNA, 35 bp, Artificial Sequence
  Synthetic oligonucleotide
gcacacaggcacatgctgacttgaccgtggaccct

SEQ ID NO: 11479 - DNA, 38 bp, Artificial Sequence
  Synthetic oligonucleotide
gcaggacggcacaacgattgtacagatcactctcgtga

SEQ ID NO: 11480 - DNA, 35 bp, Artificial Sequence
  Synthetic oligonucleotide
gcatgacgcaggagcagaaaatggccttacctcgg

SEQ ID NO: 11481 - DNA, 37 bp, Artificial Sequence
  Synthetic oligonucleotide
gccaaccggagtcgattgtcgtgactagcatgcctga

SEQ ID NO: 11482 - DNA, 36 bp, Artificial Sequence
  Synthetic oligonucleotide
gccaacgggccaactgctgcaaactctactcctaca

SEQ ID NO: 11483 - DNA, 35 bp, Artificial Sequence
  Synthetic oligonucleotide
gccatcgacgctaggtaatgacgtgctgcaaatcg

SEQ ID NO: 11484 - DNA, 38 bp, Artificial Sequence
  Synthetic oligonucleotide
gccatgcccggtagtcgagctcgactgtcttagagtga

SEQ ID NO: 11485 - DNA, 35 bp, Artificial Sequence
  Synthetic oligonucleotide
gcgcacgtgagctgtacacgttccctgacctatgt

SEQ ID NO: 11486 - DNA, 35 bp, Artificial Sequence
  Synthetic oligonucleotide
gctatgtcccaacaataactgctaccggaggatga

SEQ ID NO: 11487 - DNA, 35 bp, Artificial Sequence
  Synthetic oligonucleotide
gtcccaacacgtcggttagtcggtccccgagtccc

SEQ ID NO: 11488 - DNA, 36 bp, Artificial Sequence
  Synthetic oligonucleotide
gtcgtgacggggtgcagtgcagtgacgcattaacaa

SEQ ID NO: 11489 - DNA, 35 bp, Artificial Sequence
  Synthetic oligonucleotide
gttgaggagcatggtacattgctgagtgttagcgt

SEQ ID NO: 11490 - DNA, 35 bp, Artificial Sequence
  Synthetic oligonucleotide
gttgccgactcgtacccgcgtaacgcaagatgcac

SEQ ID NO: 11491 - DNA, 36 bp, Artificial Sequence
  Synthetic oligonucleotide
tacgagcaagcaatggtctggcgttcgtgccgtgta

SEQ ID NO: 11492 - DNA, 34 bp, Artificial Sequence
  Synthetic oligonucleotide
tagccccgcctcgacgtcccacacaacacttcaa

SEQ ID NO: 11493 - DNA, 38 bp, Artificial Sequence
  Synthetic oligonucleotide
tatgtgctgcatcacacagtcattcggggtatcattga

SEQ ID NO: 11494 - DNA, 37 bp, Artificial Sequence
  Synthetic oligonucleotide
tcagtaccgcacatggaacgacgataccctctgtgga

SEQ ID NO: 11495 - DNA, 35 bp, Artificial Sequence
  Synthetic oligonucleotide
tcatgccccgtcccaacgtgagaggagtgtcgccg

SEQ ID NO: 11496 - DNA, 37 bp, Artificial Sequence
  Synthetic oligonucleotide
tccataaccgccaccctggatatcaccgcagcaggga

SEQ ID NO: 11497 - DNA, 37 bp, Artificial Sequence
  Synthetic oligonucleotide
tgaccccgccacactgtacgtcgtaaatctattcaga

SEQ ID NO: 11498 - DNA, 37 bp, Artificial Sequence
  Synthetic oligonucleotide
tgagtggagcctaagctgttatctggaagacgtgtga

SEQ ID NO: 11499 - DNA, 36 bp, Artificial Sequence
  Synthetic oligonucleotide
ttcgacagggcccttcaaacttacgcaacaatccca

SEQ ID NO: 11500 - DNA, 35 bp, Artificial Sequence
  Synthetic oligonucleotide
ttgaggggcgcacaccaaccgttctgtcccatttg

SEQ ID NO: 11501 - DNA, 38 bp, Artificial Sequence
  Synthetic oligonucleotide
ttgccaagcgcaatcgaccgggacagtaccctacgtga

SEQ ID NO: 11502 - DNA, 35 bp, Artificial Sequence
  Synthetic oligonucleotide
aacaccgatcagaagactcacatggaccagtaagg

SEQ ID NO: 11503 - DNA, 36 bp, Artificial Sequence
  Synthetic oligonucleotide
aacacgccaaagtgcaggaggttatgtactcacgaa

SEQ ID NO: 11504 - DNA, 37 bp, Artificial Sequence
  Synthetic oligonucleotide
acacacaggcgcaagttcaggtagccgtttccattga

SEQ ID NO: 11505 - DNA, 35 bp, Artificial Sequence
  Synthetic oligonucleotide
acacacctcaatcaagaacgaggtagcatgttgta

SEQ ID NO: 11506 - DNA, 35 bp, Artificial Sequence
  Synthetic oligonucleotide
acatgccgaccctcctacccaccgctgaagcctcg

SEQ ID NO: 11507 - DNA, 36 bp, Artificial Sequence
  Synthetic oligonucleotide
acgatgcaggccgacaagaaccgtatcaatgaacaa

SEQ ID NO: 11508 - DNA, 36 bp, Artificial Sequence
  Synthetic oligonucleotide
acgctactgaccccgcaataaagagcttcgctcgca

SEQ ID NO: 11509 - DNA, 37 bp, Artificial Sequence
  Synthetic oligonucleotide
acgtcaccgagctgctcgagctattcactgaccccga

SEQ ID NO: 11510 - DNA, 38 bp, Artificial Sequence
  Synthetic oligonucleotide
actgaaccgcgaccgaacgtgaaggagaggtgtggtta

SEQ ID NO: 11511 - DNA, 38 bp, Artificial Sequence
  Synthetic oligonucleotide
atccgaggccgtcacatagaattagcgtcccccaatga

SEQ ID NO: 11512 - DNA, 37 bp, Artificial Sequence
  Synthetic oligonucleotide
attgcacagaaggataacgaccctggagtcgatgtaa

SEQ ID NO: 11513 - DNA, 35 bp, Artificial Sequence
  Synthetic oligonucleotide
ctgcccacatcctttaatcacgtcgcactaaggca

SEQ ID NO: 11514 - DNA, 36 bp, Artificial Sequence
  Synthetic oligonucleotide
gaacaaccggttggagctgtcaagggtgagcctcca

SEQ ID NO: 11515 - DNA, 37 bp, Artificial Sequence
  Synthetic oligonucleotide
gacacacgccacgggactccggtggggatgtattgga

SEQ ID NO: 11516 - DNA, 36 bp, Artificial Sequence
  Synthetic oligonucleotide
gacccgaagtggacaacgatacttttgtcctcggga

SEQ ID NO: 11517 - DNA, 36 bp, Artificial Sequence
  Synthetic oligonucleotide
gacgagccgacgagtggaataggggcttgaacggaa

SEQ ID NO: 11518 - DNA, 36 bp, Artificial Sequence
  Synthetic oligonucleotide
gacgaggcacgatgaatacaaagacgtgcaatgata

SEQ ID NO: 11519 - DNA, 35 bp, Artificial Sequence
  Synthetic oligonucleotide
gacgccgcagtgagacaccagtcaggtcttgtggc

SEQ ID NO: 11520 - DNA, 37 bp, Artificial Sequence
  Synthetic oligonucleotide
gacgcctccggtcgtgttttgggccgatgttgctgga

SEQ ID NO: 11521 - DNA, 38 bp, Artificial Sequence
  Synthetic oligonucleotide
gacgcggttcacatgtgggtacagaatcaattgtgtga

SEQ ID NO: 11522 - DNA, 35 bp, Artificial Sequence
  Synthetic oligonucleotide
gactgcaggggatgagaggaggaacgggatggtac

SEQ ID NO: 11523 - DNA, 36 bp, Artificial Sequence
  Synthetic oligonucleotide
gagagctgcccggcctaggtgtactagtggtcttaa

SEQ ID NO: 11524 - DNA, 35 bp, Artificial Sequence
  Synthetic oligonucleotide
gatgcaccagctagaagggatcatgtgcggaggga

SEQ ID NO: 11525 - DNA, 36 bp, Artificial Sequence
  Synthetic oligonucleotide
gatgcaccgtagacgtaagaaagcagtttgccttaa

SEQ ID NO: 11526 - DNA, 35 bp, Artificial Sequence
  Synthetic oligonucleotide
gcacacacgccgagttccttatggacgtctacgcg

SEQ ID NO: 11527 - DNA, 36 bp, Artificial Sequence
  Synthetic oligonucleotide
gcacacgcctctgtatacgccgtgtcgaaagtacta

SEQ ID NO: 11528 - DNA, 38 bp, Artificial Sequence
  Synthetic oligonucleotide
gcaccgtgcgggcgtggaatagagatcgacctcgctga

SEQ ID NO: 11529 - DNA, 35 bp, Artificial Sequence
  Synthetic oligonucleotide
gcacgatcaggactgcttaaacgatactcgaggct

SEQ ID NO: 11530 - DNA, 35 bp, Artificial Sequence
  Synthetic oligonucleotide
gcagagctttgcacgccttactccacctgaccccg

SEQ ID NO: 11531 - DNA, 35 bp, Artificial Sequence
  Synthetic oligonucleotide
gccacgtgaggtggtagggagaacacgtgacaaag

SEQ ID NO: 11532 - DNA, 36 bp, Artificial Sequence
  Synthetic oligonucleotide
gccgaaaggcaacgatggaaggagtcatattccgta

SEQ ID NO: 11533 - DNA, 35 bp, Artificial Sequence
  Synthetic oligonucleotide
gccgaagctggctgctgtcactaactaacgggaaa

SEQ ID NO: 11534 - DNA, 35 bp, Artificial Sequence
  Synthetic oligonucleotide
gccgccaggcatgcagtcccgagaccgtgatgtcg

SEQ ID NO: 11535 - DNA, 36 bp, Artificial Sequence
  Synthetic oligonucleotide
gcctgcggaggtctgccctgttccgtcccaacggaa

SEQ ID NO: 11536 - DNA, 35 bp, Artificial Sequence
  Synthetic oligonucleotide
gcgagagcacacgtggggtcctgggttagtgaaca

SEQ ID NO: 11537 - DNA, 37 bp, Artificial Sequence
  Synthetic oligonucleotide
gcgagagcacgggctgtggttcggacaatatttatga

SEQ ID NO: 11538 - DNA, 35 bp, Artificial Sequence
  Synthetic oligonucleotide
gtcaaccgccaacctcgtccttatgtcgcaccaca

SEQ ID NO: 11539 - DNA, 35 bp, Artificial Sequence
  Synthetic oligonucleotide
gtcacagccaaggggggacctggttacatgtctgt

SEQ ID NO: 11540 - DNA, 37 bp, Artificial Sequence
  Synthetic oligonucleotide
gtgcccggtccgaggccgaaactgctcacacactcga

SEQ ID NO: 11541 - DNA, 35 bp, Artificial Sequence
  Synthetic oligonucleotide
gtgcgaatggcgaatagaggcgataaagagacagt

SEQ ID NO: 11542 - DNA, 35 bp, Artificial Sequence
  Synthetic oligonucleotide
gtgggtcacacaacaaatttagccggtaggtccga

SEQ ID NO: 11543 - DNA, 35 bp, Artificial Sequence
  Synthetic oligonucleotide
gtgtcctcaccgtgcatggcaactacattattcaa

SEQ ID NO: 11544 - DNA, 38 bp, Artificial Sequence
  Synthetic oligonucleotide
tacaccccggccaaaacacgtcgataggtgcgtcatga

SEQ ID NO: 11545 - DNA, 35 bp, Artificial Sequence
  Synthetic oligonucleotide
tacccgaagtaggagtactgcgttcccaagcgcat

SEQ ID NO: 11546 - DNA, 37 bp, Artificial Sequence
  Synthetic oligonucleotide
tcaccgctaccctgattgagagcgacagtacagcaga

SEQ ID NO: 11547 - DNA, 35 bp, Artificial Sequence
  Synthetic oligonucleotide
tcgacaatcagtcagatcagtcaagacgtcctata

SEQ ID NO: 11548 - DNA, 35 bp, Artificial Sequence
  Synthetic oligonucleotide
tgaacgcgaaggattaatggagtgccatgtgcttg

SEQ ID NO: 11549 - DNA, 36 bp, Artificial Sequence
  Synthetic oligonucleotide
tgcacacgacaaactgaatgaccagaatgggacgga

SEQ ID NO: 11550 - DNA, 36 bp, Artificial Sequence
  Synthetic oligonucleotide
tgcacagtccagtcgcacgttgggacgtaagggtaa

SEQ ID NO: 11551 - DNA, 36 bp, Artificial Sequence
  Synthetic oligonucleotide
tgccgaggtgccaattaaaacgtgtcgtcgattgaa

SEQ ID NO: 11552 - DNA, 36 bp, Artificial Sequence
  Synthetic oligonucleotide
tgtacgctgtcgtccatcgcctattctatctctcta

SEQ ID NO: 11553 - DNA, 35 bp, Artificial Sequence
  Synthetic oligonucleotide
ttaccaacacacgcagttcaagccgctggacttag

SEQ ID NO: 11554 - DNA, 38 bp, Artificial Sequence
  Synthetic oligonucleotide
ttgcggaccacatcggggtgatacagtagcagtcgtga

SEQ ID NO: 11555 - DNA, 36 bp, Artificial Sequence
  Synthetic oligonucleotide
ttggacccgacgtaatgtattgtggcattatataaa

SEQ ID NO: 11556 - DNA, 37 bp, Artificial Sequence
  Synthetic oligonucleotide
aaagccgcttagacccccagactgttagttagcgcga

SEQ ID NO: 11557 - DNA, 36 bp, Artificial Sequence
  Synthetic oligonucleotide
aacacagccgaacacaagtacttatcgcgacgtaca

SEQ ID NO: 11558 - DNA, 36 bp, Artificial Sequence
  Synthetic oligonucleotide
aacgaccgcagtgccacctacaatgcttctcgcaca

SEQ ID NO: 11559 - DNA, 38 bp, Artificial Sequence
  Synthetic oligonucleotide
aatgccacggatgtaaagtacgcggagtcccaatgtga

SEQ ID NO: 11560 - DNA, 38 bp, Artificial Sequence
  Synthetic oligonucleotide
acacgcacccgtccatgcacgccgcacgatctccctga

SEQ ID NO: 11561 - DNA, 36 bp, Artificial Sequence
  Synthetic oligonucleotide
agacacgcaccgactgacgtgcttcgtagatgcaga

SEQ ID NO: 11562 - DNA, 36 bp, Artificial Sequence
  Synthetic oligonucleotide
atacaccccaaggtcagtccagtcagagcgcaaata

SEQ ID NO: 11563 - DNA, 36 bp, Artificial Sequence
  Synthetic oligonucleotide
atcgcaggggggtagacccgttgcctgacagtttaa

SEQ ID NO: 11564 - DNA, 37 bp, Artificial Sequence
  Synthetic oligonucleotide
atgcccgcccaggagaggtaaagaggctaggctagga

SEQ ID NO: 11565 - DNA, 35 bp, Artificial Sequence
  Synthetic oligonucleotide
gacaacgcataaactctaaaaacatattcttcacc

SEQ ID NO: 11566 - DNA, 35 bp, Artificial Sequence
  Synthetic oligonucleotide
gacaagccggtgctacccagaggctgatacgtagg

SEQ ID NO: 11567 - DNA, 36 bp, Artificial Sequence
  Synthetic oligonucleotide
gacacaccgcgaactgtgcatgggtgcagtcaccaa

SEQ ID NO: 11568 - DNA, 36 bp, Artificial Sequence
  Synthetic oligonucleotide
gacacggggcaccataaacactgaccacaaggctaa

SEQ ID NO: 11569 - DNA, 35 bp, Artificial Sequence
  Synthetic oligonucleotide
gacgacgagtgtgtacagtatttccccaatctctt

SEQ ID NO: 11570 - DNA, 36 bp, Artificial Sequence
  Synthetic oligonucleotide
gactcgaccctcccgtcgtgtaataaccggtgaaga

SEQ ID NO: 11571 - DNA, 37 bp, Artificial Sequence
  Synthetic oligonucleotide
gactggagcctactcacgcctacatgacggtcatcga

SEQ ID NO: 11572 - DNA, 36 bp, Artificial Sequence
  Synthetic oligonucleotide
gcaacacgaacgcgctaatgtaccctgaattcatca

SEQ ID NO: 11573 - DNA, 36 bp, Artificial Sequence
  Synthetic oligonucleotide
gcacaacatcgggtgcacagacgtactgaataaaca

SEQ ID NO: 11574 - DNA, 38 bp, Artificial Sequence
  Synthetic oligonucleotide
gcatgctgcaaggtaataagcccccgaataccctctga

SEQ ID NO: 11575 - DNA, 35 bp, Artificial Sequence
  Synthetic oligonucleotide
gccaacctgccgaatcgtagaccctccactgcccc

SEQ ID NO: 11576 - DNA, 37 bp, Artificial Sequence
  Synthetic oligonucleotide
gccaagcacccgcaccgtgaaatcgtgacacatggga

SEQ ID NO: 11577 - DNA, 35 bp, Artificial Sequence
  Synthetic oligonucleotide
gccacgtgcagtgcgacagagttctccggtgaggt

SEQ ID NO: 11578 - DNA, 36 bp, Artificial Sequence
  Synthetic oligonucleotide
gggacgggtcagggcgggacatcagtttcagtcaca

SEQ ID NO: 11579 - DNA, 38 bp, Artificial Sequence
  Synthetic oligonucleotide
ggtgggcgggtggggctgtaggtctgttatgggcctga

SEQ ID NO: 11580 - DNA, 38 bp, Artificial Sequence
  Synthetic oligonucleotide
gtcacagggcacgccatgcaccatcatctctgtgttga

SEQ ID NO: 11581 - DNA, 35 bp, Artificial Sequence
  Synthetic oligonucleotide
gtgaagccaagctggaatgagacttgacgagagat

SEQ ID NO: 11582 - DNA, 38 bp, Artificial Sequence
  Synthetic oligonucleotide
gtgcaccggccttccccagagaggacacctaaggctga

SEQ ID NO: 11583 - DNA, 36 bp, Artificial Sequence
  Synthetic oligonucleotide
gtgccgtccagttctgagtacccatgcgtaacctga

SEQ ID NO: 11584 - DNA, 38 bp, Artificial Sequence
  Synthetic oligonucleotide
taacacgtgcagacttacagtgatagaagacgtattga

SEQ ID NO: 11585 - DNA, 35 bp, Artificial Sequence
  Synthetic oligonucleotide
tacaacgcagtagtaggctctcccccccaataacc

SEQ ID NO: 11586 - DNA, 34 bp, Artificial Sequence
  Synthetic oligonucleotide
tacacaccccactgcgtctatagtttggcactgg

SEQ ID NO: 11587 - DNA, 36 bp, Artificial Sequence
  Synthetic oligonucleotide
tacacatgcagtaccgtgtcaacgtgcccgattcca

SEQ ID NO: 11588 - DNA, 36 bp, Artificial Sequence
  Synthetic oligonucleotide
taccacccaaccgcgatgggcgttctggatgaggta

SEQ ID NO: 11589 - DNA, 38 bp, Artificial Sequence
  Synthetic oligonucleotide
tcaacgggcggttgaagacgtgcaaatcgtatccttga

SEQ ID NO: 11590 - DNA, 36 bp, Artificial Sequence
  Synthetic oligonucleotide
tcacgcacacgccgtctcattcaccttattttgcta

SEQ ID NO: 11591 - DNA, 35 bp, Artificial Sequence
  Synthetic oligonucleotide
tcactgccgcatccaaatgtatatccgtaccattg

SEQ ID NO: 11592 - DNA, 36 bp, Artificial Sequence
  Synthetic oligonucleotide
tcagacgccacagtgatgaagccagcgctttgggta

SEQ ID NO: 11593 - DNA, 37 bp, Artificial Sequence
  Synthetic oligonucleotide
tgtcccgcaacagtctgctcaccgaaaccaatcacga

SEQ ID NO: 11594 - DNA, 38 bp, Artificial Sequence
  Synthetic oligonucleotide
tgtgacgctaacgattctggagtcgacgatgttgctga

SEQ ID NO: 11595 - DNA, 37 bp, Artificial Sequence
  Synthetic oligonucleotide
aaacacacacggacagttcatcgtcatccatcacgga

SEQ ID NO: 11596 - DNA, 35 bp, Artificial Sequence
  Synthetic oligonucleotide
aaccccgcgcccgcttcatgagagagtcacgtcct

SEQ ID NO: 11597 - DNA, 37 bp, Artificial Sequence
  Synthetic oligonucleotide
aatcacgcagggtgactctgaaaccatagtcgagcga

SEQ ID NO: 11598 - DNA, 37 bp, Artificial Sequence
  Synthetic oligonucleotide
acacacttaactccaccaatacggtcgcttgcatcga

SEQ ID NO: 11599 - DNA, 35 bp, Artificial Sequence
  Synthetic oligonucleotide
acacgcacgtcctcgataacacgcgaccatccatt

SEQ ID NO: 11600 - DNA, 35 bp, Artificial Sequence
  Synthetic oligonucleotide
acatccccaccgacctaatctggagacacctacgt

SEQ ID NO: 11601 - DNA, 38 bp, Artificial Sequence
  Synthetic oligonucleotide
accaccatgcacgtgcaagcccacgggttgttttttga

SEQ ID NO: 11602 - DNA, 35 bp, Artificial Sequence
  Synthetic oligonucleotide
accaccgcagttcattgcaccacgtgccattttct

SEQ ID NO: 11603 - DNA, 37 bp, Artificial Sequence
  Synthetic oligonucleotide
accgacgcaaagactttgtggcgtactagagacccga

SEQ ID NO: 11604 - DNA, 36 bp, Artificial Sequence
  Synthetic oligonucleotide
acgaacgacaacgcaggatctagggtaagtagggta

SEQ ID NO: 11605 - DNA, 35 bp, Artificial Sequence
  Synthetic oligonucleotide
actccacaacgccgaaccccgcgtaaccatcacca

SEQ ID NO: 11606 - DNA, 37 bp, Artificial Sequence
  Synthetic oligonucleotide
atgcgaacggcgggagcaacgtgagcaacgtaaggga

SEQ ID NO: 11607 - DNA, 37 bp, Artificial Sequence
  Synthetic oligonucleotide
cacgaacagaccgctgcagtttacagataattgcgga

SEQ ID NO: 11608 - DNA, 38 bp, Artificial Sequence
  Synthetic oligonucleotide
gacgaacgggcggtcggcgaagaaacgtacacgcttga

SEQ ID NO: 11609 - DNA, 36 bp, Artificial Sequence
  Synthetic oligonucleotide
gacgacacgcgtagcacgtaatgatgggtagtcgaa

SEQ ID NO: 11610 - DNA, 36 bp, Artificial Sequence
  Synthetic oligonucleotide
gacgatggtgggttattgtgagagctgtacctcaga

SEQ ID NO: 11611 - DNA, 36 bp, Artificial Sequence
  Synthetic oligonucleotide
gacgcgcaacagtatgtagtccgatcagttccctaa

SEQ ID NO: 11612 - DNA, 38 bp, Artificial Sequence
  Synthetic oligonucleotide
gactgcacggaacgcttcagacgatagccccttattga

SEQ ID NO: 11613 - DNA, 36 bp, Artificial Sequence
  Synthetic oligonucleotide
gagtgctgctgtccgaggtcgaaccacacacctcaa

SEQ ID NO: 11614 - DNA, 37 bp, Artificial Sequence
  Synthetic oligonucleotide
gatgcccatgctcctgtcaagccctagtccatctaga

SEQ ID NO: 11615 - DNA, 37 bp, Artificial Sequence
  Synthetic oligonucleotide
gatggcgcagccggtaaggagtaatgcctggggacga

SEQ ID NO: 11616 - DNA, 35 bp, Artificial Sequence
  Synthetic oligonucleotide
gatgtccacccatataccaacacagaaacgccttg

SEQ ID NO: 11617 - DNA, 38 bp, Artificial Sequence
  Synthetic oligonucleotide
gatgtcccagtgtcggtaagctccttggtccacgatga

SEQ ID NO: 11618 - DNA, 36 bp, Artificial Sequence
  Synthetic oligonucleotide
gcacacagcccccggtatgctctaggactgtaccca

SEQ ID NO: 11619 - DNA, 37 bp, Artificial Sequence
  Synthetic oligonucleotide
gccaaggagcacgtagggtccggacttaactcaagca

SEQ ID NO: 11620 - DNA, 37 bp, Artificial Sequence
  Synthetic oligonucleotide
gccacacacagtgacacacattacatacgtccgagga

SEQ ID NO: 11621 - DNA, 35 bp, Artificial Sequence
  Synthetic oligonucleotide
gcgcgagcacgaacgcgtatttctgacgtaggatc

SEQ ID NO: 11622 - DNA, 35 bp, Artificial Sequence
  Synthetic oligonucleotide
gctgccgtagcgatcatataagcttcggagaaagc

SEQ ID NO: 11623 - DNA, 37 bp, Artificial Sequence
  Synthetic oligonucleotide
ggcaaacggcgctggttggaggtgcccgattttgaga

SEQ ID NO: 11624 - DNA, 36 bp, Artificial Sequence
  Synthetic oligonucleotide
gtcgcagtcctctagccttatctctctgtgacccca

SEQ ID NO: 11625 - DNA, 37 bp, Artificial Sequence
  Synthetic oligonucleotide
gttgcgcaggttacacaacatcagaaaacaatcatga

SEQ ID NO: 11626 - DNA, 34 bp, Artificial Sequence
  Synthetic oligonucleotide
tacaccgcacactactgccctcagaacatttgtt

SEQ ID NO: 11627 - DNA, 31 bp, Artificial Sequence
  Synthetic oligonucleotide
taccacatgccaggtcgtatatcgataatga

SEQ ID NO: 11628 - DNA, 36 bp, Artificial Sequence
  Synthetic oligonucleotide
taccgagccgaagcagtgagatgttgagctggtcaa

SEQ ID NO: 11629 - DNA, 36 bp, Artificial Sequence
  Synthetic oligonucleotide
tagcacggtcgcagtcttacattaatctcgtcagaa

SEQ ID NO: 11630 - DNA, 35 bp, Artificial Sequence
  Synthetic oligonucleotide
tatgccggtaccacgtgggtcatacaacacttcca

SEQ ID NO: 11631 - DNA, 37 bp, Artificial Sequence
  Synthetic oligonucleotide
tcaatcgcaagcatcctctgagaccttaatcgataga

SEQ ID NO: 11632 - DNA, 38 bp, Artificial Sequence
  Synthetic oligonucleotide
tcacaccccagtgacaaacgcaatcaggttggtcctga

SEQ ID NO: 11633 - DNA, 35 bp, Artificial Sequence
  Synthetic oligonucleotide
tcagaggctggaggtcacctgggtcagtctgctat

SEQ ID NO: 11634 - DNA, 36 bp, Artificial Sequence
  Synthetic oligonucleotide
tcataccggccgatgacgtccatctcgcaactgcta

SEQ ID NO: 11635 - DNA, 35 bp, Artificial Sequence
  Synthetic oligonucleotide
tgaccggagagggcgggggagtaccggaatgttcg

SEQ ID NO: 11636 - DNA, 35 bp, Artificial Sequence
  Synthetic oligonucleotide
tgagacgcagaggtacagtatctcgagagctactc

SEQ ID NO: 11637 - DNA, 35 bp, Artificial Sequence
  Synthetic oligonucleotide
tgcacacgtgactgcaccgagtgtgtactgctata

SEQ ID NO: 11638 - DNA, 35 bp, Artificial Sequence
  Synthetic oligonucleotide
tgcatacgccagggtgagtggaccgcgggacttgt

SEQ ID NO: 11639 - DNA, 36 bp, Artificial Sequence
  Synthetic oligonucleotide
tgctgcctgccctgccaatactgtgctttatcgtta

SEQ ID NO: 11640 - DNA, 35 bp, Artificial Sequence
  Synthetic oligonucleotide
tgtccaacccaaatgatataggatccaacctgact

SEQ ID NO: 11641 - DNA, 35 bp, Artificial Sequence
  Synthetic oligonucleotide
ttgccccggtcgtcatctagccggccataactttt

SEQ ID NO: 11642 - DNA, 35 bp, Artificial Sequence
  Synthetic oligonucleotide
ttgggaccgctgctgtgtcatccacccgttcttcg

SEQ ID NO: 11643 - DNA, 35 bp, Artificial Sequence
  Synthetic oligonucleotide
aacacccgcgagcatctaacttcctacactacatc

SEQ ID NO: 11644 - DNA, 37 bp, Artificial Sequence
  Synthetic oligonucleotide
aacgaagccgaagcgcctcggaactgtctgcaaatga

SEQ ID NO: 11645 - DNA, 37 bp, Artificial Sequence
  Synthetic oligonucleotide
aacgatcgcaaacgtgggtagtaaggtatcggatgga

SEQ ID NO: 11646 - DNA, 38 bp, Artificial Sequence
  Synthetic oligonucleotide
acacgcactccacccggtcacgaaccagtctattgtga

SEQ ID NO: 11647 - DNA, 38 bp, Artificial Sequence
  Synthetic oligonucleotide
acatgcggtcgcgtgtccgacatcggcttcacccttga

SEQ ID NO: 11648 - DNA, 36 bp, Artificial Sequence
  Synthetic oligonucleotide
accgactgcgactgcacatcccgtaagctttagtta

SEQ ID NO: 11649 - DNA, 38 bp, Artificial Sequence
  Synthetic oligonucleotide
acgagctgtcgcgagtacggaactgtcgctgtatgtga

SEQ ID NO: 11650 - DNA, 36 bp, Artificial Sequence
  Synthetic oligonucleotide
agcaccacatgaatacacggcctttcgtaagactca

SEQ ID NO: 11651 - DNA, 37 bp, Artificial Sequence
  Synthetic oligonucleotide
atgccagacccgaattgtgcacaagctacttagtcga

SEQ ID NO: 11652 - DNA, 35 bp, Artificial Sequence
  Synthetic oligonucleotide
attgccgcgcatcatctatcgtgtctttctctatc

SEQ ID NO: 11653 - DNA, 35 bp, Artificial Sequence
  Synthetic oligonucleotide
ccacgaaagacccccagaaagcccgtccacgtgtg

SEQ ID NO: 11654 - DNA, 35 bp, Artificial Sequence
  Synthetic oligonucleotide
gaagggcaatgagcgtacttttgtcactcacacta

SEQ ID NO: 11655 - DNA, 38 bp, Artificial Sequence
  Synthetic oligonucleotide
gacacgatcaacatttgggacagtcgctttccggttga

SEQ ID NO: 11656 - DNA, 35 bp, Artificial Sequence
  Synthetic oligonucleotide
gaccaaatcgaacgtcggtagtatgcgctgtgccg

SEQ ID NO: 11657 - DNA, 35 bp, Artificial Sequence
  Synthetic oligonucleotide
gaccgcgcagtacgtaagttggtgacctgttgaag

SEQ ID NO: 11658 - DNA, 37 bp, Artificial Sequence
  Synthetic oligonucleotide
gacgacgcagtactaacggtaggtccatgtcgtacga

SEQ ID NO: 11659 - DNA, 35 bp, Artificial Sequence
  Synthetic oligonucleotide
gacgacgcccatcatcaccctgtaatactgtcact

SEQ ID NO: 11660 - DNA, 38 bp, Artificial Sequence
  Synthetic oligonucleotide
gacgcgacgacagataggtatagcttataacgctgtga

SEQ ID NO: 11661 - DNA, 38 bp, Artificial Sequence
  Synthetic oligonucleotide
gacggacggaaggactcatcacagtgtaggttacgtga

SEQ ID NO: 11662 - DNA, 35 bp, Artificial Sequence
  Synthetic oligonucleotide
gactcacaccgcacgtgttgttcaggcctgctgcg

SEQ ID NO: 11663 - DNA, 36 bp, Artificial Sequence
  Synthetic oligonucleotide
gagccggagaacgtactcaggtgcggtaagattaca

SEQ ID NO: 11664 - DNA, 37 bp, Artificial Sequence
  Synthetic oligonucleotide
gagtgggcgggagttgactaagaacaccaaatagaga

SEQ ID NO: 11665 - DNA, 38 bp, Artificial Sequence
  Synthetic oligonucleotide
gcaccccatcgcattttagccgccaggaaactgagtga

SEQ ID NO: 11666 - DNA, 35 bp, Artificial Sequence
  Synthetic oligonucleotide
gcacgagagggaagaaagtttgactgcggtgttaa

SEQ ID NO: 11667 - DNA, 38 bp, Artificial Sequence
  Synthetic oligonucleotide
gcactagcaggcgaggatgtggtccttcctcatattga

SEQ ID NO: 11668 - DNA, 35 bp, Artificial Sequence
  Synthetic oligonucleotide
gcagatgcaccgctaacaaccttggacggctattg

SEQ ID NO: 11669 - DNA, 35 bp, Artificial Sequence
  Synthetic oligonucleotide
gccatgacaccctcggaaaggaatctggcatctag

SEQ ID NO: 11670 - DNA, 37 bp, Artificial Sequence
  Synthetic oligonucleotide
gcgacacaagcgctgtgacacatgtcgatgtccggga

SEQ ID NO: 11671 - DNA, 37 bp, Artificial Sequence
  Synthetic oligonucleotide
gcgaggtgcaggtttggcttactcgaacgacattgga

SEQ ID NO: 11672 - DNA, 38 bp, Artificial Sequence
  Synthetic oligonucleotide
gctggtgacaaggcgggcactgtgttatatggatatga

SEQ ID NO: 11673 - DNA, 35 bp, Artificial Sequence
  Synthetic oligonucleotide
ggatacgccggtgtatgcgatgtgtgtacccttaa

SEQ ID NO: 11674 - DNA, 38 bp, Artificial Sequence
  Synthetic oligonucleotide
ggtgtacacggacggccgatctcactgaccccgcctga

SEQ ID NO: 11675 - DNA, 35 bp, Artificial Sequence
  Synthetic oligonucleotide
gtagccaggccgtacttaccggtcatcgaaactac

SEQ ID NO: 11676 - DNA, 35 bp, Artificial Sequence
  Synthetic oligonucleotide
gtgacgcaactgtcacatgagtaattgttaggcat

SEQ ID NO: 11677 - DNA, 37 bp, Artificial Sequence
  Synthetic oligonucleotide
gtgccccccaagatgtcgcatgaagcttacagagcga

SEQ ID NO: 11678 - DNA, 36 bp, Artificial Sequence
  Synthetic oligonucleotide
taacaccgaacgctgcgaaccgaacgccccatggta

SEQ ID NO: 11679 - DNA, 37 bp, Artificial Sequence
  Synthetic oligonucleotide
tacacgcccaaggacgcacatcacaccctgacgatga

SEQ ID NO: 11680 - DNA, 36 bp, Artificial Sequence
  Synthetic oligonucleotide
tacgaagcacatcaatataagctcccttgggagtta

SEQ ID NO: 11681 - DNA, 35 bp, Artificial Sequence
  Synthetic oligonucleotide
tacgccgaccaggatgacgtaggtgacacgtaacg

SEQ ID NO: 11682 - DNA, 35 bp, Artificial Sequence
  Synthetic oligonucleotide
tatgcccgcactgtgactgacaatttaaggaggta

SEQ ID NO: 11683 - DNA, 36 bp, Artificial Sequence
  Synthetic oligonucleotide
tcacggacgaagaggggaggggtgagtttggtttta

SEQ ID NO: 11684 - DNA, 37 bp, Artificial Sequence
  Synthetic oligonucleotide
tcatcgcgggcgggtcagtaaggaaaggtgggccgga

SEQ ID NO: 11685 - DNA, 37 bp, Artificial Sequence
  Synthetic oligonucleotide
tgacacagccaaggtgtgcatgatgcggagtccgaga

SEQ ID NO: 11686 - DNA, 38 bp, Artificial Sequence
  Synthetic oligonucleotide
tgacccatgtcgtgcataaagtattgtcgagttggtga

SEQ ID NO: 11687 - DNA, 35 bp, Artificial Sequence
  Synthetic oligonucleotide
tgcgagggccaatcaggtaggggttacaacaatcg

SEQ ID NO: 11688 - DNA, 35 bp, Artificial Sequence
  Synthetic oligonucleotide
tgtgaaccccggatgtcgaggtacgcgatgttacc

SEQ ID NO: 11689 - DNA, 36 bp, Artificial Sequence
  Synthetic oligonucleotide
tgtgacacgcgcggacgtagatgagcgttcaattga

SEQ ID NO: 11690 - DNA, 37 bp, Artificial Sequence
  Synthetic oligonucleotide
aacacatggcgggtcgttcgatggttcgacatgctga

SEQ ID NO: 11691 - DNA, 38 bp, Artificial Sequence
  Synthetic oligonucleotide
aacacgccgggaggtgtcgcctctgagtcatctcatga

SEQ ID NO: 11692 - DNA, 36 bp, Artificial Sequence
  Synthetic oligonucleotide
aacgcaccacagacatggtcgactcagttctgagta

SEQ ID NO: 11693 - DNA, 35 bp, Artificial Sequence
  Synthetic oligonucleotide
acacgcacgctggaaggggattgcgcctacgtcac

SEQ ID NO: 11694 - DNA, 36 bp, Artificial Sequence
  Synthetic oligonucleotide
accaccgggcaattcgtaagcatagttctgtacgca

SEQ ID NO: 11695 - DNA, 37 bp, Artificial Sequence
  Synthetic oligonucleotide
accgcccatcacccacgtaccgaaccgccgcaatgga

SEQ ID NO: 11696 - DNA, 35 bp, Artificial Sequence
  Synthetic oligonucleotide
acctgcatcagctattggtcaaagggaaggtaatc

SEQ ID NO: 11697 - DNA, 38 bp, Artificial Sequence
  Synthetic oligonucleotide
atcgaccgcagtactcgaggtaacgtagataggattga

SEQ ID NO: 11698 - DNA, 34 bp, Artificial Sequence
  Synthetic oligonucleotide
atgacagcccatacttacgcccactgacgcattc

SEQ ID NO: 11699 - DNA, 36 bp, Artificial Sequence
  Synthetic oligonucleotide
atgccacggtacgcgaaatgtagaggcatacctaca

SEQ ID NO: 11700 - DNA, 36 bp, Artificial Sequence
  Synthetic oligonucleotide
gaacggggcatggcaatgaacttacaggtgatgtta

SEQ ID NO: 11701 - DNA, 35 bp, Artificial Sequence
  Synthetic oligonucleotide
gaatcccaattcgtcgtagtgcatgacgggcttta

SEQ ID NO: 11702 - DNA, 37 bp, Artificial Sequence
  Synthetic oligonucleotide
gacaacgggggtgcataaaagcgttacacagtatgga

SEQ ID NO: 11703 - DNA, 38 bp, Artificial Sequence
  Synthetic oligonucleotide
gacacctgaactgcgagtgtagcttccccccctcgtga

SEQ ID NO: 11704 - DNA, 38 bp, Artificial Sequence
  Synthetic oligonucleotide
gacacgatcgggagttgagatagcgtgatagccgttga

SEQ ID NO: 11705 - DNA, 36 bp, Artificial Sequence
  Synthetic oligonucleotide
gaccacgccgaacgcgtacgactgacatagatggta

SEQ ID NO: 11706 - DNA, 37 bp, Artificial Sequence
  Synthetic oligonucleotide
gaccccacccgctgcacccggtacgcgtctttctcga

SEQ ID NO: 11707 - DNA, 37 bp, Artificial Sequence
  Synthetic oligonucleotide
gaccccgcccacgcccttcctacatctccgcttgaga

SEQ ID NO: 11708 - DNA, 36 bp, Artificial Sequence
  Synthetic oligonucleotide
gacgcccaggcacccactgagcatttacccgcttga

SEQ ID NO: 11709 - DNA, 37 bp, Artificial Sequence
  Synthetic oligonucleotide
gactcacgcaggctctaggtacgccataccacaacga

SEQ ID NO: 11710 - DNA, 37 bp, Artificial Sequence
  Synthetic oligonucleotide
gagggccaccgcctcgcatacaagacctcagtgggga

SEQ ID NO: 11711 - DNA, 37 bp, Artificial Sequence
  Synthetic oligonucleotide
gagtacgccaattgaactccaagtacgcattatgcga

SEQ ID NO: 11712 - DNA, 35 bp, Artificial Sequence
  Synthetic oligonucleotide
gatcgacgcacaccaacccacgaactccgggactc

SEQ ID NO: 11713 - DNA, 38 bp, Artificial Sequence
  Synthetic oligonucleotide
gcacacgtcgcgcagtattcctcacccacctatcgtga

SEQ ID NO: 11714 - DNA, 38 bp, Artificial Sequence
  Synthetic oligonucleotide
gcaccaggccagactgtcagcaccagacgcatgcatga

SEQ ID NO: 11715 - DNA, 38 bp, Artificial Sequence
  Synthetic oligonucleotide
gcagagcgccgaagccacgtggatcagtcctggagtga

SEQ ID NO: 11716 - DNA, 38 bp, Artificial Sequence
  Synthetic oligonucleotide
gcaggagctctaaggagtgtacgcaatggtcaaactga

SEQ ID NO: 11717 - DNA, 35 bp, Artificial Sequence
  Synthetic oligonucleotide
gcatacctcgcatacactgaggtcatgaataccac

SEQ ID NO: 11718 - DNA, 38 bp, Artificial Sequence
  Synthetic oligonucleotide
gcatgtccgggccagagccaatgggccagggcacatga

SEQ ID NO: 11719 - DNA, 35 bp, Artificial Sequence
  Synthetic oligonucleotide
gccaactccggatgcctgatacctcgaaggagtaa

SEQ ID NO: 11720 - DNA, 36 bp, Artificial Sequence
  Synthetic oligonucleotide
gccgtgacgcgacacatttgagacgggttgtgtgaa

SEQ ID NO: 11721 - DNA, 38 bp, Artificial Sequence
  Synthetic oligonucleotide
gcgacaaccgcttatgacgacctggcgagttagtatga

SEQ ID NO: 11722 - DNA, 36 bp, Artificial Sequence
  Synthetic oligonucleotide
gcgatagctgggagtcgaatcccacaagatcttgaa

SEQ ID NO: 11723 - DNA, 37 bp, Artificial Sequence
  Synthetic oligonucleotide
gctgtcacactgcccttgttgatccggaagtccgaga

SEQ ID NO: 11724 - DNA, 38 bp, Artificial Sequence
  Synthetic oligonucleotide
ggtgacgccactaccccgcacaaatgacgctcacctga

SEQ ID NO: 11725 - DNA, 38 bp, Artificial Sequence
  Synthetic oligonucleotide
gtcaaacgccgggtgcagacttctattgagccgcttga

SEQ ID NO: 11726 - DNA, 35 bp, Artificial Sequence
  Synthetic oligonucleotide
gtcacaaacagcagtgatgcaagcccagttctacc

SEQ ID NO: 11727 - DNA, 35 bp, Artificial Sequence
  Synthetic oligonucleotide
gtgacagtagctgcttactagggaacgacgcttag

SEQ ID NO: 11728 - DNA, 38 bp, Artificial Sequence
  Synthetic oligonucleotide
gtgcatggtcaggttaagcgcctatgttgttcaggtga

SEQ ID NO: 11729 - DNA, 36 bp, Artificial Sequence
  Synthetic oligonucleotide
gtgcgagtcgctgccgtatcatccctacaccaccta

SEQ ID NO: 11730 - DNA, 35 bp, Artificial Sequence
  Synthetic oligonucleotide
gtttgcttccgggcgacccgcctaaatgcgaataa

SEQ ID NO: 11731 - DNA, 38 bp, Artificial Sequence
  Synthetic oligonucleotide
tacacgggcacacataacattgagcttgaggttactga

SEQ ID NO: 11732 - DNA, 37 bp, Artificial Sequence
  Synthetic oligonucleotide
tcacggagtgcgtgtgcgtattgcgactcccacttga

SEQ ID NO: 11733 - DNA, 36 bp, Artificial Sequence
  Synthetic oligonucleotide
tcactgcctagcggattgtcatgatcgtccttccaa

SEQ ID NO: 11734 - DNA, 35 bp, Artificial Sequence
  Synthetic oligonucleotide
tcagcccagaacgatcttaccatgccacgctacac

SEQ ID NO: 11735 - DNA, 38 bp, Artificial Sequence
  Synthetic oligonucleotide
tcagccgcccacgatctctgactacgcaacaggtctga

SEQ ID NO: 11736 - DNA, 35 bp, Artificial Sequence
  Synthetic oligonucleotide
tcagtccggtcgaaagggtcatcaaggaacatggg

SEQ ID NO: 11737 - DNA, 36 bp, Artificial Sequence
  Synthetic oligonucleotide
tcccaagccgtcgcaaagatagaggactcccgttca

SEQ ID NO: 11738 - DNA, 37 bp, Artificial Sequence
  Synthetic oligonucleotide
tcgatcgcacgagcaggttctaacagccgcccctcga

SEQ ID NO: 11739 - DNA, 35 bp, Artificial Sequence
  Synthetic oligonucleotide
tctgaagccgcgcaaggctcaacacttttcatgac

SEQ ID NO: 11740 - DNA, 38 bp, Artificial Sequence
  Synthetic oligonucleotide
tgagagccgcaatctgacaggatacatagcgttactga

SEQ ID NO: 11741 - DNA, 35 bp, Artificial Sequence
  Synthetic oligonucleotide
tgcccaggcggccgttaatcttcttccctcgctca

SEQ ID NO: 11742 - DNA, 35 bp, Artificial Sequence
  Synthetic oligonucleotide
tgcgcaagaatggtcctgggttcgcacgaatcatg

SEQ ID NO: 11743 - DNA, 38 bp, Artificial Sequence
  Synthetic oligonucleotide
tgtcacacacttccaaacggactgccccgctcacctga

SEQ ID NO: 11744 - DNA, 35 bp, Artificial Sequence
  Synthetic oligonucleotide
aaccacacaatcggtaccgaaacagctaattcgtg

SEQ ID NO: 11745 - DNA, 35 bp, Artificial Sequence
  Synthetic oligonucleotide
aaccaccgtggggatggttatattgttcagacggc

SEQ ID NO: 11746 - DNA, 35 bp, Artificial Sequence
  Synthetic oligonucleotide
aacgccatcccacctcgtgtattgtaagtaatctc

SEQ ID NO: 11747 - DNA, 35 bp, Artificial Sequence
  Synthetic oligonucleotide
acaccaacacacggacgaaagatggataggcgtat

SEQ ID NO: 11748 - DNA, 37 bp, Artificial Sequence
  Synthetic oligonucleotide
acatacagacgtcctcaccgaaggcaatgctccacga

SEQ ID NO: 11749 - DNA, 36 bp, Artificial Sequence
  Synthetic oligonucleotide
accaccgtgcgccccgatcgacgaaagttcacgaaa

SEQ ID NO: 11750 - DNA, 36 bp, Artificial Sequence
  Synthetic oligonucleotide
accacgctcccgtcatcaccaaccacaccacgagca

SEQ ID NO: 11751 - DNA, 38 bp, Artificial Sequence
  Synthetic oligonucleotide
acctctgaccccgcaccaatgacagtcatagggtttga

SEQ ID NO: 11752 - DNA, 35 bp, Artificial Sequence
  Synthetic oligonucleotide
acgaccccagtcgtgattccaaccaacatctcatt

SEQ ID NO: 11753 - DNA, 36 bp, Artificial Sequence
  Synthetic oligonucleotide
atagccgcacaaccagccgtgtttagtggtggacaa

SEQ ID NO: 11754 - DNA, 38 bp, Artificial Sequence
  Synthetic oligonucleotide
catacagcgatccaggataattgaggcgcattggatga

SEQ ID NO: 11755 - DNA, 38 bp, Artificial Sequence
  Synthetic oligonucleotide
gaacaagcgagcaagggcatgtcgtaagaaacagctga

SEQ ID NO: 11756 - DNA, 35 bp, Artificial Sequence
  Synthetic oligonucleotide
gaaccgttgtgtagaacaaaggcaactatactgca

SEQ ID NO: 11757 - DNA, 35 bp, Artificial Sequence
  Synthetic oligonucleotide
gaacgccctcccaagggtcttccaacacacgtacg

SEQ ID NO: 11758 - DNA, 37 bp, Artificial Sequence
  Synthetic oligonucleotide
gaatgcgtgagcgcccttagacctccaattacccaga

SEQ ID NO: 11759 - DNA, 35 bp, Artificial Sequence
  Synthetic oligonucleotide
gacactaccagcctccatgtcgtaaggatctcagt

SEQ ID NO: 11760 - DNA, 36 bp, Artificial Sequence
  Synthetic oligonucleotide
gacatcgagcgcaactgtgattgttatctgcaccaa

SEQ ID NO: 11761 - DNA, 34 bp, Artificial Sequence
  Synthetic oligonucleotide
gaccagtcgcagaggtaccatgtggagacgtgta

SEQ ID NO: 11762 - DNA, 36 bp, Artificial Sequence
  Synthetic oligonucleotide
gacgacgcaaaagtgaaagaatagtgcactatacga

SEQ ID NO: 11763 - DNA, 38 bp, Artificial Sequence
  Synthetic oligonucleotide
gacgcaccccaggggtaccagcaacgcatagcacatga

SEQ ID NO: 11764 - DNA, 37 bp, Artificial Sequence
  Synthetic oligonucleotide
gacgcaggcatccacctgggtaaataagtcaagctga

SEQ ID NO: 11765 - DNA, 36 bp, Artificial Sequence
  Synthetic oligonucleotide
gacgtcaacccgcaccaaaaacgttacctgacctaa

SEQ ID NO: 11766 - DNA, 37 bp, Artificial Sequence
  Synthetic oligonucleotide
gactgcgaaagtctggtgatcttgaggggcgatacga

SEQ ID NO: 11767 - DNA, 38 bp, Artificial Sequence
  Synthetic oligonucleotide
gactgggcgcagtcacgggatagggaggtccgggttga

SEQ ID NO: 11768 - DNA, 37 bp, Artificial Sequence
  Synthetic oligonucleotide
gatgcgcacatcgcgaacagacttttaaggtcttcga

SEQ ID NO: 11769 - DNA, 38 bp, Artificial Sequence
  Synthetic oligonucleotide
gatggtgcctgtgctgtatcatagacctctggccttga

SEQ ID NO: 11770 - DNA, 37 bp, Artificial Sequence
  Synthetic oligonucleotide
gcacactgccataggttaccagatcggtagtttacga

SEQ ID NO: 11771 - DNA, 37 bp, Artificial Sequence
  Synthetic oligonucleotide
gcacaggggaggaacgtttgtttgacgtcgtaggaga

SEQ ID NO: 11772 - DNA, 36 bp, Artificial Sequence
  Synthetic oligonucleotide
gcagtgcggtcaatatcacctacagactggggaagt

SEQ ID NO: 11773 - DNA, 37 bp, Artificial Sequence
  Synthetic oligonucleotide
gccaagcaaagtaagcagaagaggcgtcaaattccga

SEQ ID NO: 11774 - DNA, 36 bp, Artificial Sequence
  Synthetic oligonucleotide
gcccacacaactggtccgcttgacgctccgaacata

SEQ ID NO: 11775 - DNA, 35 bp, Artificial Sequence
  Synthetic oligonucleotide
gccccatgcgcacccacactctatccccacatcct

SEQ ID NO: 11776 - DNA, 37 bp, Artificial Sequence
  Synthetic oligonucleotide
gcccgacattcgttcctaatcccaggcaatgacttga

SEQ ID NO: 11777 - DNA, 36 bp, Artificial Sequence
  Synthetic oligonucleotide
gccgagccccagctcgggacggagtagtacggagga

SEQ ID NO: 11778 - DNA, 37 bp, Artificial Sequence
  Synthetic oligonucleotide
gccgcatggcacgaaatcatcttataacgcatcagga

SEQ ID NO: 11779 - DNA, 35 bp, Artificial Sequence
  Synthetic oligonucleotide
gccggaacggcgcacctgttgctctcatccttacc

SEQ ID NO: 11780 - DNA, 36 bp, Artificial Sequence
  Synthetic oligonucleotide
gcgacgaagtccgcgctcacttatcatgccctgaaa

SEQ ID NO: 11781 - DNA, 35 bp, Artificial Sequence
  Synthetic oligonucleotide
gctcaggcgggaccggaagccgccgaaaactcgct

SEQ ID NO: 11782 - DNA, 37 bp, Artificial Sequence
  Synthetic oligonucleotide
ggtgtacgcaccgtgatcctcgagaaccctacatgga

SEQ ID NO: 11783 - DNA, 38 bp, Artificial Sequence
  Synthetic oligonucleotide
gtagcaaccagacctccatcgacaccatcatgtactga

SEQ ID NO: 11784 - DNA, 38 bp, Artificial Sequence
  Synthetic oligonucleotide
gtgacggtaggtagcaaccctccaacaactgtagatga

SEQ ID NO: 11785 - DNA, 38 bp, Artificial Sequence
  Synthetic oligonucleotide
gtgagggggcgaggttatagtgcatataggcgtggtga

SEQ ID NO: 11786 - DNA, 37 bp, Artificial Sequence
  Synthetic oligonucleotide
gtgctgccccctacgttatgcgcggtgccttccaaga

SEQ ID NO: 11787 - DNA, 36 bp, Artificial Sequence
  Synthetic oligonucleotide
taccaccaccacaatcgcaaaccgttgattctagga

SEQ ID NO: 11788 - DNA, 38 bp, Artificial Sequence
  Synthetic oligonucleotide
tacgctgccagtgaatcaagcggagcggaattcgttga

SEQ ID NO: 11789 - DNA, 35 bp, Artificial Sequence
  Synthetic oligonucleotide
tagccaagccccctcctgatgcgaaataggctccg

SEQ ID NO: 11790 - DNA, 37 bp, Artificial Sequence
  Synthetic oligonucleotide
tcacacagccgacaatgtatcgtggaacgcagattga

SEQ ID NO: 11791 - DNA, 36 bp, Artificial Sequence
  Synthetic oligonucleotide
tcacgaggccgcctcaattccatgctctagaccgga

SEQ ID NO: 11792 - DNA, 38 bp, Artificial Sequence
  Synthetic oligonucleotide
tcagccctgccgcacgtaagcgaagacctcgattctga

SEQ ID NO: 11793 - DNA, 35 bp, Artificial Sequence
  Synthetic oligonucleotide
tcagtgcggacgacaaagaaatgcacgtactgccc

SEQ ID NO: 11794 - DNA, 37 bp, Artificial Sequence
  Synthetic oligonucleotide
tcatacgacggtggtaagttcctgtacaatcacctga

SEQ ID NO: 11795 - DNA, 37 bp, Artificial Sequence
  Synthetic oligonucleotide
tgacgcagtgggacgctagtgccttgggcggatacga

SEQ ID NO: 11796 - DNA, 36 bp, Artificial Sequence
  Synthetic oligonucleotide
tgagcatgccgtgcgcagtgtacgataacgggtcaa

SEQ ID NO: 11797 - DNA, 35 bp, Artificial Sequence
  Synthetic oligonucleotide
tgcccacaaccggcttgtcagcacacccaatgttg

SEQ ID NO: 11798 - DNA, 36 bp, Artificial Sequence
  Synthetic oligonucleotide
tgcgcacacgtattgtaccactgtacagtaccttta

SEQ ID NO: 11799 - DNA, 35 bp, Artificial Sequence
  Synthetic oligonucleotide
tgcgtacaccggaataacgtagatctacacgcgtt

SEQ ID NO: 11800 - DNA, 36 bp, Artificial Sequence
  Synthetic oligonucleotide
ttgatccagcagtagcgtgtgctggggcaaacatca

SEQ ID NO: 11801 - DNA, 36 bp, Artificial Sequence
  Synthetic oligonucleotide
ttgccgcccataccatcaatgagcgttctgatagga

SEQ ID NO: 11802 - DNA, 38 bp, Artificial Sequence
  Synthetic oligonucleotide
aacaccggtcagaactggtacgtagtcgctcacgttga

SEQ ID NO: 11803 - DNA, 35 bp, Artificial Sequence
  Synthetic oligonucleotide
aacgcaggcaacagtagcgatctagagtgtttggc

SEQ ID NO: 11804 - DNA, 38 bp, Artificial Sequence
  Synthetic oligonucleotide
acaaccgcaatcgtgtaaagaggtgagatggccgatga

SEQ ID NO: 11805 - DNA, 36 bp, Artificial Sequence
  Synthetic oligonucleotide
acaaccggacagacatgctcgtaaaaaattatccaa

SEQ ID NO: 11806 - DNA, 36 bp, Artificial Sequence
  Synthetic oligonucleotide
acacgactgcatcaggcctcaaggtcgtctttcgta

SEQ ID NO: 11807 - DNA, 36 bp, Artificial Sequence
  Synthetic oligonucleotide
acacgcaggcactcaggggtgtacaaccgatctgca

SEQ ID NO: 11808 - DNA, 35 bp, Artificial Sequence
  Synthetic oligonucleotide
acgtgacaccggaataggttcaaggaaggttaggc

SEQ ID NO: 11809 - DNA, 34 bp, Artificial Sequence
  Synthetic oligonucleotide
agcgaccgcacagacttagggctatggacttgtc

SEQ ID NO: 11810 - DNA, 37 bp, Artificial Sequence
  Synthetic oligonucleotide
agtgacgcaggctgtacaatctgaaggcgatatacga

SEQ ID NO: 11811 - DNA, 38 bp, Artificial Sequence
  Synthetic oligonucleotide
atgatagcaccactcgttgggactgaccgttagtgtga

SEQ ID NO: 11812 - DNA, 29 bp, Artificial Sequence
  Synthetic oligonucleotide
cggaggataccacagcataccatcaatga

SEQ ID NO: 11813 - DNA, 36 bp, Artificial Sequence
  Synthetic oligonucleotide
gaagacgaagcggtagagtatagggaagtggagaca

SEQ ID NO: 11814 - DNA, 35 bp, Artificial Sequence
  Synthetic oligonucleotide
gacacctcatggctcctatcgctgcaagaaaacgc

SEQ ID NO: 11815 - DNA, 38 bp, Artificial Sequence
  Synthetic oligonucleotide
gacacggacaaaagagtcacggggtattctgctattga

SEQ ID NO: 11816 - DNA, 36 bp, Artificial Sequence
  Synthetic oligonucleotide
gacacggacagaaagtacgactcgcgttacctaaga

SEQ ID NO: 11817 - DNA, 37 bp, Artificial Sequence
  Synthetic oligonucleotide
gacacgtccagtcacgacgctatccactaatatttga

SEQ ID NO: 11818 - DNA, 35 bp, Artificial Sequence
  Synthetic oligonucleotide
gaccactctgcaatggtcaggtctccattggtatc

SEQ ID NO: 11819 - DNA, 36 bp, Artificial Sequence
  Synthetic oligonucleotide
gacgacgcagagggggaagaaccgatttgtgtcgca

SEQ ID NO: 11820 - DNA, 38 bp, Artificial Sequence
  Synthetic oligonucleotide
gacgcactaatccataaatgagcaaacagtaataatga

SEQ ID NO: 11821 - DNA, 37 bp, Artificial Sequence
  Synthetic oligonucleotide
gacgggtcaagagttcggcgggtctgaaggactagga

SEQ ID NO: 11822 - DNA, 36 bp, Artificial Sequence
  Synthetic oligonucleotide
gatcgcacgtcccgttgatcatgggctcaacccgca

SEQ ID NO: 11823 - DNA, 35 bp, Artificial Sequence
  Synthetic oligonucleotide
gcaagtccgacagatcaaaggtcttgagtattccg

SEQ ID NO: 11824 - DNA, 36 bp, Artificial Sequence
  Synthetic oligonucleotide
gccccagcacgcacacaaagcaagtgccagttggga

SEQ ID NO: 11825 - DNA, 35 bp, Artificial Sequence
  Synthetic oligonucleotide
gctgccgaagataaagcccgtccccccctaacctt

SEQ ID NO: 11826 - DNA, 35 bp, Artificial Sequence
  Synthetic oligonucleotide
gctgcgcgagcaggacgtacctggcattggaatgt

SEQ ID NO: 11827 - DNA, 36 bp, Artificial Sequence
  Synthetic oligonucleotide
gtacggtggcaaacggttcgaaggggtcgggaaaga

SEQ ID NO: 11828 - DNA, 37 bp, Artificial Sequence
  Synthetic oligonucleotide
gtcacaccgcagctcagacccccagacattctgtcat

SEQ ID NO: 11829 - DNA, 36 bp, Artificial Sequence
  Synthetic oligonucleotide
gtgaccagtcatctgcttcaacgcacctataaacaa

SEQ ID NO: 11830 - DNA, 35 bp, Artificial Sequence
  Synthetic oligonucleotide
gtgcaccaaagtataagcgctgaaagctacgtacg

SEQ ID NO: 11831 - DNA, 38 bp, Artificial Sequence
  Synthetic oligonucleotide
tacccgcgcaggtatgagaagatgcatgtggctgttga

SEQ ID NO: 11832 - DNA, 35 bp, Artificial Sequence
  Synthetic oligonucleotide
tacgttggccgacggttggtaacgaaagcaccttt

SEQ ID NO: 11833 - DNA, 36 bp, Artificial Sequence
  Synthetic oligonucleotide
tagaccgcacgacatagcatccttcacagttcgata

SEQ ID NO: 11834 - DNA, 38 bp, Artificial Sequence
  Synthetic oligonucleotide
tagatccgccgtcaagcctaagcatagtatgggtttga

SEQ ID NO: 11835 - DNA, 38 bp, Artificial Sequence
  Synthetic oligonucleotide
tcaagcccgatggctatatcgtcagttaaagacactga

SEQ ID NO: 11836 - DNA, 35 bp, Artificial Sequence
  Synthetic oligonucleotide
tcaccgccagaaagtgcaggtacattcttttcgct

SEQ ID NO: 11837 - DNA, 36 bp, Artificial Sequence
  Synthetic oligonucleotide
tcaggacatgtgggagcatagcacagggcacatcca

SEQ ID NO: 11838 - DNA, 35 bp, Artificial Sequence
  Synthetic oligonucleotide
tccaagcacgttgcataccctaggaccgctattgt

SEQ ID NO: 11839 - DNA, 35 bp, Artificial Sequence
  Synthetic oligonucleotide
tccaccgcgagagtaagccatagtctacgtgccgg

SEQ ID NO: 11840 - DNA, 35 bp, Artificial Sequence
  Synthetic oligonucleotide
tctgaccccgtacttatttttccagcctgctaaac

SEQ ID NO: 11841 - DNA, 35 bp, Artificial Sequence
  Synthetic oligonucleotide
tgacatccgggtggatacggtaggcatacgctcaa

SEQ ID NO: 11842 - DNA, 35 bp, Artificial Sequence
  Synthetic oligonucleotide
tgacgcccacgtaatcgtcgctgagcaagcattct

SEQ ID NO: 11843 - DNA, 38 bp, Artificial Sequence
  Synthetic oligonucleotide
tgctgcacggcaacggactttggtagtcctcaacttga

SEQ ID NO: 11844 - DNA, 35 bp, Artificial Sequence
  Synthetic oligonucleotide
tgtgcggtcatggcgccgtatctctttcgtatgtt

SEQ ID NO: 11845 - DNA, 36 bp, Artificial Sequence
  Synthetic oligonucleotide
ttacacgtcgcagtaactgatctcgtatatcacgga

SEQ ID NO: 11846 - DNA, 36 bp, Artificial Sequence
  Synthetic oligonucleotide
ttacccgcctcacatctgtcatgcacatccacgaaa

SEQ ID NO: 11847 - DNA, 37 bp, Artificial Sequence
  Synthetic oligonucleotide
ttgccccctgccaccgtgactcgatcctgcggtagga

SEQ ID NO: 11848 - DNA, 36 bp, Artificial Sequence
  Synthetic oligonucleotide
ttgtccgccatgcccactcagacagttcatcgctca

SEQ ID NO: 11849 - DNA, 37 bp, Artificial Sequence
  Synthetic oligonucleotide
aaacacaacgccggtggaacgggattgcggtctccga

SEQ ID NO: 11850 - DNA, 36 bp, Artificial Sequence
  Synthetic oligonucleotide
aacacacgtgggagatgatctgtcgagatgccataa

SEQ ID NO: 11851 - DNA, 35 bp, Artificial Sequence
  Synthetic oligonucleotide
aactcaccccgcagtgaagcctaagtgagtgcgtt

SEQ ID NO: 11852 - DNA, 37 bp, Artificial Sequence
  Synthetic oligonucleotide
aagacgcaggctgcggtatagcgctagtaatcggtaa

SEQ ID NO: 11853 - DNA, 37 bp, Artificial Sequence
  Synthetic oligonucleotide
agcgacgggacgggttatacggagctacgtaactgca

SEQ ID NO: 11854 - DNA, 36 bp, Artificial Sequence
  Synthetic oligonucleotide
atgcccccaacttgacttgtcgtacgtttctgcgga

SEQ ID NO: 11855 - DNA, 36 bp, Artificial Sequence
  Synthetic oligonucleotide
atgcgccagtaaacagacatcaatgtgttcacgtga

SEQ ID NO: 11856 - DNA, 34 bp, Artificial Sequence
  Synthetic oligonucleotide
cacagcacaaaacgacagcctgttccgctcgacg

SEQ ID NO: 11857 - DNA, 36 bp, Artificial Sequence
  Synthetic oligonucleotide
gacaacgcaatattcacgtgagttcgtcagttccga

SEQ ID NO: 11858 - DNA, 35 bp, Artificial Sequence
  Synthetic oligonucleotide
gacaagtgctgcaacacaactcctgtgacagcctg

SEQ ID NO: 11859 - DNA, 37 bp, Artificial Sequence
  Synthetic oligonucleotide
gacacacaccgccggaagtccagtcatcactgctcga

SEQ ID NO: 11860 - DNA, 38 bp, Artificial Sequence
  Synthetic oligonucleotide
gacgacgaccagacggtggagagatcattaaatactga

SEQ ID NO: 11861 - DNA, 37 bp, Artificial Sequence
  Synthetic oligonucleotide
gacgacgtggataacaccttaagcgagggggagaaga

SEQ ID NO: 11862 - DNA, 35 bp, Artificial Sequence
  Synthetic oligonucleotide
gacgcatgtccggacgcgtccccactcatcgtaat

SEQ ID NO: 11863 - DNA, 36 bp, Artificial Sequence
  Synthetic oligonucleotide
gagccgcaccggcctgctctctatctagcctctaaa

SEQ ID NO: 11864 - DNA, 35 bp, Artificial Sequence
  Synthetic oligonucleotide
gatacatgcggcaaatgtctgtccaccgatgtgtc

SEQ ID NO: 11865 - DNA, 36 bp, Artificial Sequence
  Synthetic oligonucleotide
gatcaccgcacaaaacgtagacaaggcgtggcgata

SEQ ID NO: 11866 - DNA, 35 bp, Artificial Sequence
  Synthetic oligonucleotide
gatgcgtgtcgttaaaatagcatagaggcttccgt

SEQ ID NO: 11867 - DNA, 36 bp, Artificial Sequence
  Synthetic oligonucleotide
gatgggcgcctcagtccggaactatacattctacta

SEQ ID NO: 11868 - DNA, 38 bp, Artificial Sequence
  Synthetic oligonucleotide
gcacaccgtgagcgcgtgcgagaatatcataggtctga

SEQ ID NO: 11869 - DNA, 35 bp, Artificial Sequence
  Synthetic oligonucleotide
gcccaagccacctactctacaccgacgtggtacgc

SEQ ID NO: 11870 - DNA, 38 bp, Artificial Sequence
  Synthetic oligonucleotide
gccgaggtagagcatgagatttctacggtcctggttga

SEQ ID NO: 11871 - DNA, 35 bp, Artificial Sequence
  Synthetic oligonucleotide
ggaccgggtgcgcagttataatacactccaattgc

SEQ ID NO: 11872 - DNA, 36 bp, Artificial Sequence
  Synthetic oligonucleotide
ggtgccaggcggggatgcgaacgccgaaaattataa

SEQ ID NO: 11873 - DNA, 36 bp, Artificial Sequence
  Synthetic oligonucleotide
gtcatgccccagggcacaaatagcggaagggacaaa

SEQ ID NO: 11874 - DNA, 35 bp, Artificial Sequence
  Synthetic oligonucleotide
gtgacgctgtgtcgagtttggccttcctcgctcgg

SEQ ID NO: 11875 - DNA, 38 bp, Artificial Sequence
  Synthetic oligonucleotide
gtgatcgccgaaaaacgtgtgctcagccacccatgtga

SEQ ID NO: 11876 - DNA, 38 bp, Artificial Sequence
  Synthetic oligonucleotide
gtgccacacctgattgtacacaccactcacagttatga

SEQ ID NO: 11877 - DNA, 37 bp, Artificial Sequence
  Synthetic oligonucleotide
tcaacaccgccaccattaggccgcaaggaagttgtga

SEQ ID NO: 11878 - DNA, 38 bp, Artificial Sequence
  Synthetic oligonucleotide
tcacgtcggtgccgtccacctaaccatctcctcgatga

SEQ ID NO: 11879 - DNA, 35 bp, Artificial Sequence
  Synthetic oligonucleotide
tccgaacaggacgtcctaatatgtcgtcattgagg

SEQ ID NO: 11880 - DNA, 38 bp, Artificial Sequence
  Synthetic oligonucleotide
tccgcacaggacggacgcgatcgataggaggatcatga

SEQ ID NO: 11881 - DNA, 35 bp, Artificial Sequence
  Synthetic oligonucleotide
tctgcaacccattgcaccgtgactcccaaggcacc

SEQ ID NO: 11882 - DNA, 37 bp, Artificial Sequence
  Synthetic oligonucleotide
tgcacttaccccgcaccttacgttaacgacgccccga

SEQ ID NO: 11883 - DNA, 37 bp, Artificial Sequence
  Synthetic oligonucleotide
tgtcatgccagcttgctacgaatatcgcccctatcga

SEQ ID NO: 11884 - DNA, 38 bp, Artificial Sequence
  Synthetic oligonucleotide
tgtgccgtcaccacatcgaagccgtactttgcttatga

SEQ ID NO: 11885 - DNA, 37 bp, Artificial Sequence
  Synthetic oligonucleotide
aacaccgctcaggtgtgggatatggagcatgtcggga

SEQ ID NO: 11886 - DNA, 35 bp, Artificial Sequence
  Synthetic oligonucleotide
acacagggacctggtacggactacgaagcacctcg

SEQ ID NO: 11887 - DNA, 35 bp, Artificial Sequence
  Synthetic oligonucleotide
acacgcaaacgttacctgaactgtagtgcactagg

SEQ ID NO: 11888 - DNA, 35 bp, Artificial Sequence
  Synthetic oligonucleotide
acacgcacggcctggcaattgatttgtactcatgt

SEQ ID NO: 11889 - DNA, 38 bp, Artificial Sequence
  Synthetic oligonucleotide
accagtgtcgcgggtgtctaggaacggttacgctgtga

SEQ ID NO: 11890 - DNA, 38 bp, Artificial Sequence
  Synthetic oligonucleotide
accatccgggagggtggtgccgtacgtcatgtttttga

SEQ ID NO: 11891 - DNA, 37 bp, Artificial Sequence
  Synthetic oligonucleotide
acccacacccccacatataccagaacggcaatccgga

SEQ ID NO: 11892 - DNA, 35 bp, Artificial Sequence
  Synthetic oligonucleotide
atcgcccctccgtaccaccacagcatagcccacag

SEQ ID NO: 11893 - DNA, 36 bp, Artificial Sequence
  Synthetic oligonucleotide
atgccaacggcaagctggagctccatcgaacgaaca

SEQ ID NO: 11894 - DNA, 36 bp, Artificial Sequence
  Synthetic oligonucleotide
cacacgacagggcccactacccaggacgtccgcaga

SEQ ID NO: 11895 - DNA, 37 bp, Artificial Sequence
  Synthetic oligonucleotide
gaacacacgaggaacggggataggtgtggtcatggga

SEQ ID NO: 11896 - DNA, 35 bp, Artificial Sequence
  Synthetic oligonucleotide
gaacgcgcacccgcagacctaccgtccacttccct

SEQ ID NO: 11897 - DNA, 36 bp, Artificial Sequence
  Synthetic oligonucleotide
gaatcgccaaggacggaaataggagagctcgtgtca

SEQ ID NO: 11898 - DNA, 35 bp, Artificial Sequence
  Synthetic oligonucleotide
gacaacccacatgtgcgtgtagaggccgaaagatt

SEQ ID NO: 11899 - DNA, 38 bp, Artificial Sequence
  Synthetic oligonucleotide
gacccgacggaatatcgtacctcgatcccttatactga

SEQ ID NO: 11900 - DNA, 36 bp, Artificial Sequence
  Synthetic oligonucleotide
gacgcaacaccccagtctctgcccacgacatccaga

SEQ ID NO: 11901 - DNA, 35 bp, Artificial Sequence
  Synthetic oligonucleotide
gacgcaaggagttcgctttaaccaatgagtacgtg

SEQ ID NO: 11902 - DNA, 38 bp, Artificial Sequence
  Synthetic oligonucleotide
gacgcgctagctgagtacgaggatgacggaaggcctga

SEQ ID NO: 11903 - DNA, 35 bp, Artificial Sequence
  Synthetic oligonucleotide
gactcgccgcaattaagtgtgacatcacttgccat

SEQ ID NO: 11904 - DNA, 36 bp, Artificial Sequence
  Synthetic oligonucleotide
gcaaacgtacagtaggttaaggcagtagcgcgttaa

SEQ ID NO: 11905 - DNA, 38 bp, Artificial Sequence
  Synthetic oligonucleotide
gcaacaaaccgttacgtgcattgagatcacacgtgtga

SEQ ID NO: 11906 - DNA, 37 bp, Artificial Sequence
  Synthetic oligonucleotide
gcacaagcctcctacactatatgagaacgtcgtagga

SEQ ID NO: 11907 - DNA, 37 bp, Artificial Sequence
  Synthetic oligonucleotide
gcacctgcctcatttcccgtaccgattcctgtaccga

SEQ ID NO: 11908 - DNA, 38 bp, Artificial Sequence
  Synthetic oligonucleotide
gcatcacggtgcagatgccattacaaagaacgcaatga

SEQ ID NO: 11909 - DNA, 36 bp, Artificial Sequence
  Synthetic oligonucleotide
gccaccccagtggtgaagattagttgtgtcttgata

SEQ ID NO: 11910 - DNA, 38 bp, Artificial Sequence
  Synthetic oligonucleotide
gccgaaccaccttaatgccccatggactgtcgccttga

SEQ ID NO: 11911 - DNA, 36 bp, Artificial Sequence
  Synthetic oligonucleotide
gccgagaggcgtactacacattccatggcgatcaca

SEQ ID NO: 11912 - DNA, 37 bp, Artificial Sequence
  Synthetic oligonucleotide
gcctcgtccacacaggtgctttcttctcgtcaaatga

SEQ ID NO: 11913 - DNA, 35 bp, Artificial Sequence
  Synthetic oligonucleotide
gcgagggccagttcgcttcgaccttactcgttact

SEQ ID NO: 11914 - DNA, 35 bp, Artificial Sequence
  Synthetic oligonucleotide
ggaacccacccacatcgcaacgcatgccactgacc

SEQ ID NO: 11915 - DNA, 37 bp, Artificial Sequence
  Synthetic oligonucleotide
ggtcacccccaaagcaacaacacgagatactggctga

SEQ ID NO: 11916 - DNA, 36 bp, Artificial Sequence
  Synthetic oligonucleotide
gtccaagcgcatacgtgtgaaagtacaccctcgcta

SEQ ID NO: 11917 - DNA, 35 bp, Artificial Sequence
  Synthetic oligonucleotide
gtgcgaccatgcacgatcgatatcctacctacaac

SEQ ID NO: 11918 - DNA, 34 bp, Artificial Sequence
  Synthetic oligonucleotide
gtgcgcaccctgaacaaactacggacacgttgca

SEQ ID NO: 11919 - DNA, 36 bp, Artificial Sequence
  Synthetic oligonucleotide
gtgggatcgcgcaccccaagagaaagccaacaccga

SEQ ID NO: 11920 - DNA, 35 bp, Artificial Sequence
  Synthetic oligonucleotide
tacacccgcgtgtctaagttcataagtcatgctca

SEQ ID NO: 11921 - DNA, 35 bp, Artificial Sequence
  Synthetic oligonucleotide
tacacgccggcgactcgcaacaccaccttgacaac

SEQ ID NO: 11922 - DNA, 36 bp, Artificial Sequence
  Synthetic oligonucleotide
tacatcaccgaccccagtatccagcgatgaccccca

SEQ ID NO: 11923 - DNA, 38 bp, Artificial Sequence
  Synthetic oligonucleotide
taccgaccctgaccccgctcgtccatttagcggagtga

SEQ ID NO: 11924 - DNA, 37 bp, Artificial Sequence
  Synthetic oligonucleotide
tagccgcacagctggggttaacattacaaggtcacga

SEQ ID NO: 11925 - DNA, 36 bp, Artificial Sequence
  Synthetic oligonucleotide
tatcgcggccatgtaataaatctacccgtttgtcaa

SEQ ID NO: 11926 - DNA, 35 bp, Artificial Sequence
  Synthetic oligonucleotide
tcagcatgccccagcatacaatgtactgcatctgc

SEQ ID NO: 11927 - DNA, 38 bp, Artificial Sequence
  Synthetic oligonucleotide
tcagcgaggcaagttgtagatgggctccgtcgtattga

SEQ ID NO: 11928 - DNA, 38 bp, Artificial Sequence
  Synthetic oligonucleotide
tcatgccaacgtatgcacatgtaaccaaactgatatga

SEQ ID NO: 11929 - DNA, 38 bp, Artificial Sequence
  Synthetic oligonucleotide
tccaaccccagtactacatgacaccgccacgtcagtga

SEQ ID NO: 11930 - DNA, 38 bp, Artificial Sequence
  Synthetic oligonucleotide
tccacagcacttttgctagctcccgtacgaaggcttga

SEQ ID NO: 11931 - DNA, 36 bp, Artificial Sequence
  Synthetic oligonucleotide
tcgaccccatccaacttgataacgtactgttaggga

SEQ ID NO: 11932 - DNA, 35 bp, Artificial Sequence
  Synthetic oligonucleotide
aacaccgtaccccagtgtatgtccacaccgttgtc

SEQ ID NO: 11933 - DNA, 38 bp, Artificial Sequence
  Synthetic oligonucleotide
aacgcgaggcacagtaggttaaggagtagcgccattga

SEQ ID NO: 11934 - DNA, 35 bp, Artificial Sequence
  Synthetic oligonucleotide
acacaacgcacttgtgccgcatcggagtcgctttg

SEQ ID NO: 11935 - DNA, 36 bp, Artificial Sequence
  Synthetic oligonucleotide
accaacagcccaagatcgaactacgagccggagcaa

SEQ ID NO: 11936 - DNA, 36 bp, Artificial Sequence
  Synthetic oligonucleotide
acgagtgcaccatagccgctttgtcacctttaccca

SEQ ID NO: 11937 - DNA, 38 bp, Artificial Sequence
  Synthetic oligonucleotide
agacaccggcacagcgaaacacaagctgcggatcatga

SEQ ID NO: 11938 - DNA, 37 bp, Artificial Sequence
  Synthetic oligonucleotide
agcaaccgtaaagcaccggggagaaccaagtttgaga

SEQ ID NO: 11939 - DNA, 37 bp, Artificial Sequence
  Synthetic oligonucleotide
atgcaacaacgatttggcatgaccacagctcaaatga

SEQ ID NO: 11940 - DNA, 38 bp, Artificial Sequence
  Synthetic oligonucleotide
atggtgcaacgagcgattggccacccgtcgatgcatga

SEQ ID NO: 11941 - DNA, 35 bp, Artificial Sequence
  Synthetic oligonucleotide
ccaaactgcatcagaatcctcatgtatgactcaaa

SEQ ID NO: 11942 - DNA, 35 bp, Artificial Sequence
  Synthetic oligonucleotide
gaagcctaggctgacttcaacccccagaccacacc

SEQ ID NO: 11943 - DNA, 35 bp, Artificial Sequence
  Synthetic oligonucleotide
gacaccacccgtcggtacagagaaagggtgcacaa

SEQ ID NO: 11944 - DNA, 38 bp, Artificial Sequence
  Synthetic oligonucleotide
gacaccgcacatgaaccgatacacggctgtaaccatga

SEQ ID NO: 11945 - DNA, 37 bp, Artificial Sequence
  Synthetic oligonucleotide
gacacctcatgtagctgacttcaactgatggtcgaga

SEQ ID NO: 11946 - DNA, 37 bp, Artificial Sequence
  Synthetic oligonucleotide
gacacgcaggcagtacccgacagctcagtaaatctga

SEQ ID NO: 11947 - DNA, 35 bp, Artificial Sequence
  Synthetic oligonucleotide
gacccggtccaacgccatcatagccatttgctcca

SEQ ID NO: 11948 - DNA, 36 bp, Artificial Sequence
  Synthetic oligonucleotide
gaccctgcccggtgaagtacaagatggacaatcgaa

SEQ ID NO: 11949 - DNA, 35 bp, Artificial Sequence
  Synthetic oligonucleotide
gaccgcaaccacactccgcataatgctggtctaca

SEQ ID NO: 11950 - DNA, 38 bp, Artificial Sequence
  Synthetic oligonucleotide
gacgacgccgtaggtgtgagctgaacgtacgagcttga

SEQ ID NO: 11951 - DNA, 38 bp, Artificial Sequence
  Synthetic oligonucleotide
gacgcgagctgggggatagatgactgcatcggatctga

SEQ ID NO: 11952 - DNA, 37 bp, Artificial Sequence
  Synthetic oligonucleotide
gacggaaagaagcaccgaatgatctgactcgttctga

SEQ ID NO: 11953 - DNA, 35 bp, Artificial Sequence
  Synthetic oligonucleotide
gacgtgctgccggcgacgagtacgggagacaatgt

SEQ ID NO: 11954 - DNA, 36 bp, Artificial Sequence
  Synthetic oligonucleotide
gactgccacggtcgcaagctagcacaacatctcata

SEQ ID NO: 11955 - DNA, 35 bp, Artificial Sequence
  Synthetic oligonucleotide
gagccaacgaccggtgtctattaccattcgcgagg

SEQ ID NO: 11956 - DNA, 38 bp, Artificial Sequence
  Synthetic oligonucleotide
gagtgcaggggaacccgggtcgtgcgcaacaggattga

SEQ ID NO: 11957 - DNA, 36 bp, Artificial Sequence
  Synthetic oligonucleotide
gatgcaacgcgaacctagtacagaaacacgtgctta

SEQ ID NO: 11958 - DNA, 37 bp, Artificial Sequence
  Synthetic oligonucleotide
gatgcatcgatcagcacggccacggacgcaatgcaga

SEQ ID NO: 11959 - DNA, 35 bp, Artificial Sequence
  Synthetic oligonucleotide
gcatgcacagctcacgaaacggagactcttcgttc

SEQ ID NO: 11960 - DNA, 37 bp, Artificial Sequence
  Synthetic oligonucleotide
gccacccccaacactgtgccaaagccttaataccgga

SEQ ID NO: 11961 - DNA, 37 bp, Artificial Sequence
  Synthetic oligonucleotide
gccatgccaactgatagccaccctagtaaccttctga

SEQ ID NO: 11962 - DNA, 35 bp, Artificial Sequence
  Synthetic oligonucleotide
gcccaacatccggtcgattccttgaggtgtttcag

SEQ ID NO: 11963 - DNA, 37 bp, Artificial Sequence
  Synthetic oligonucleotide
gcccgatcgcaacgatagagggcgtacagtaccctga

SEQ ID NO: 11964 - DNA, 36 bp, Artificial Sequence
  Synthetic oligonucleotide
gccgcatggcctcggatgaattttgcttgatgttta

SEQ ID NO: 11965 - DNA, 36 bp, Artificial Sequence
  Synthetic oligonucleotide
gcgacattgctgaggtacgaacgatttgctgacgga

SEQ ID NO: 11966 - DNA, 37 bp, Artificial Sequence
  Synthetic oligonucleotide
gggacgaagcatcagttagttctggctcgttgcgcga

SEQ ID NO: 11967 - DNA, 38 bp, Artificial Sequence
  Synthetic oligonucleotide
ggtgcgaacgactctggggagtgtttaaattcatgtga

SEQ ID NO: 11968 - DNA, 35 bp, Artificial Sequence
  Synthetic oligonucleotide
gtcaacgcatcaacgctctaccacgaggaccggta

SEQ ID NO: 11969 - DNA, 37 bp, Artificial Sequence
  Synthetic oligonucleotide
gtcacgcaactcgtgtgcgtacgggtcgtagaacgga

SEQ ID NO: 11970 - DNA, 37 bp, Artificial Sequence
  Synthetic oligonucleotide
gtgcggacatctacgtcgatcacctctcgttgggtga

SEQ ID NO: 11971 - DNA, 37 bp, Artificial Sequence
  Synthetic oligonucleotide
tacgagacgcgcattccttgttactgctttgtctcga

SEQ ID NO: 11972 - DNA, 38 bp, Artificial Sequence
  Synthetic oligonucleotide
tcaagccaagctgcaagtgtgttttcgatcgtcgctga

SEQ ID NO: 11973 - DNA, 35 bp, Artificial Sequence
  Synthetic oligonucleotide
tcagaccggatgccgacataacgtgcttatcctct

SEQ ID NO: 11974 - DNA, 36 bp, Artificial Sequence
  Synthetic oligonucleotide
tcatgcccggcagaatcggtggtttggatacgaaga

SEQ ID NO: 11975 - DNA, 38 bp, Artificial Sequence
  Synthetic oligonucleotide
tcatgcgtacgctggctttaccaagtttcctcatatga

SEQ ID NO: 11976 - DNA, 37 bp, Artificial Sequence
  Synthetic oligonucleotide
tccaaggggcagatgcgagagacactgagagggtgga

SEQ ID NO: 11977 - DNA, 35 bp, Artificial Sequence
  Synthetic oligonucleotide
tccacccatcctgtcttatgtacacgtcgccgaac

SEQ ID NO: 11978 - DNA, 37 bp, Artificial Sequence
  Synthetic oligonucleotide
tgacgaacgtaagaggtacatggaacgtacatggcga

SEQ ID NO: 11979 - DNA, 37 bp, Artificial Sequence
  Synthetic oligonucleotide
tgcatgtgtgcagttgcgcttccagacacatgattga

SEQ ID NO: 11980 - DNA, 37 bp, Artificial Sequence
  Synthetic oligonucleotide
ttgccaagtccatgcatccgtcttgaggcacacacga

SEQ ID NO: 11981 - DNA, 38 bp, Artificial Sequence
  Synthetic oligonucleotide
ttgtcggagcagacaaggggcactgaggatgtcgctga

SEQ ID NO: 11982 - DNA, 36 bp, Artificial Sequence
  Synthetic oligonucleotide
aaaccgcacggaggtgcacccatgctaacagttaga

SEQ ID NO: 11983 - DNA, 38 bp, Artificial Sequence
  Synthetic oligonucleotide
aaagcccgcgcaaccaatcgagcaacattcaggactga

SEQ ID NO: 11984 - DNA, 38 bp, Artificial Sequence
  Synthetic oligonucleotide
aagacaaccggcagggaggccacatattaccgggacga

SEQ ID NO: 11985 - DNA, 35 bp, Artificial Sequence
  Synthetic oligonucleotide
aaggacgcgcacctattatcgttcttgcagacaac

SEQ ID NO: 11986 - DNA, 35 bp, Artificial Sequence
  Synthetic oligonucleotide
acacagacggacgcggtctacgggcacgcatatgg

SEQ ID NO: 11987 - DNA, 37 bp, Artificial Sequence
  Synthetic oligonucleotide
acaccaccctttgttgttaaggtgccttaggtactga

SEQ ID NO: 11988 - DNA, 38 bp, Artificial Sequence
  Synthetic oligonucleotide
acacgcaatggtcataagatacggacattcggtgctga

SEQ ID NO: 11989 - DNA, 36 bp, Artificial Sequence
  Synthetic oligonucleotide
acacgcgccggagctgtctcgcacgcatcaataaca

SEQ ID NO: 11990 - DNA, 35 bp, Artificial Sequence
  Synthetic oligonucleotide
acatccgcaagagcctcactacaagggctgctgtg

SEQ ID NO: 11991 - DNA, 35 bp, Artificial Sequence
  Synthetic oligonucleotide
accacagcaagacgagaccagaacagcttccacgc

SEQ ID NO: 11992 - DNA, 36 bp, Artificial Sequence
  Synthetic oligonucleotide
accacgccaaatgtacgatgcagggtgctttgacca

SEQ ID NO: 11993 - DNA, 35 bp, Artificial Sequence
  Synthetic oligonucleotide
accctgccgccgatctactctgaccccgcactttg

SEQ ID NO: 11994 - DNA, 35 bp, Artificial Sequence
  Synthetic oligonucleotide
agtccgaaggaaacgtccatacctactgaccccgc

SEQ ID NO: 11995 - DNA, 35 bp, Artificial Sequence
  Synthetic oligonucleotide
ccaccgctggaagagcaatcttggatatagcgaca

SEQ ID NO: 11996 - DNA, 38 bp, Artificial Sequence
  Synthetic oligonucleotide
gaagcggatgcagctaacatcgtgtatctgtcatctga

SEQ ID NO: 11997 - DNA, 38 bp, Artificial Sequence
  Synthetic oligonucleotide
gacacaagcatgagacgtgtattgttcgtgcagtctga

SEQ ID NO: 11998 - DNA, 35 bp, Artificial Sequence
  Synthetic oligonucleotide
gacacccctgaacgaccaaacatcgtatgactctc

SEQ ID NO: 11999 - DNA, 38 bp, Artificial Sequence
  Synthetic oligonucleotide
gacacccgagtcgctcaatctcccagtccttatcgtga

SEQ ID NO: 12000 - DNA, 37 bp, Artificial Sequence
  Synthetic oligonucleotide
gacagacgtaggtgggtgaacaaccgcattactaaga

SEQ ID NO: 12001 - DNA, 36 bp, Artificial Sequence
  Synthetic oligonucleotide
gaccaagcatcgcatgtggaagtgaagtcacgacaa

SEQ ID NO: 12002 - DNA, 37 bp, Artificial Sequence
  Synthetic oligonucleotide
gacccagtcaggatcaagtacctgggaaaccacaaga

SEQ ID NO: 12003 - DNA, 38 bp, Artificial Sequence
  Synthetic oligonucleotide
gactcgtaggagatgcacgagtggccaattgggattga

SEQ ID NO: 12004 - DNA, 36 bp, Artificial Sequence
  Synthetic oligonucleotide
gactgcctcaggcacgtacaccacgtttaggagtta

SEQ ID NO: 12005 - DNA, 36 bp, Artificial Sequence
  Synthetic oligonucleotide
gagcccaatccgtcgtgttagcaatccaattcctca

SEQ ID NO: 12006 - DNA, 35 bp, Artificial Sequence
  Synthetic oligonucleotide
gatacgcgcccacaacttagacgtgaaattcagag

SEQ ID NO: 12007 - DNA, 38 bp, Artificial Sequence
  Synthetic oligonucleotide
gatgcgcacttatgcgttcggtactccgggtcctgtga

SEQ ID NO: 12008 - DNA, 35 bp, Artificial Sequence
  Synthetic oligonucleotide
gatgcgggcacaggtagcattaattgatcgacgtt

SEQ ID NO: 12009 - DNA, 35 bp, Artificial Sequence
  Synthetic oligonucleotide
gcaacgggccatagtgactggttgacgcacatatg

SEQ ID NO: 12010 - DNA, 38 bp, Artificial Sequence
  Synthetic oligonucleotide
gcacaaagcgcaattgcctcagaagctcctacatttga

SEQ ID NO: 12011 - DNA, 36 bp, Artificial Sequence
  Synthetic oligonucleotide
gcacacgcaataagtgtggtgcagaggagagtgcaa

SEQ ID NO: 12012 - DNA, 35 bp, Artificial Sequence
  Synthetic oligonucleotide
gcatgcgaaagaccgtcagcctatagacggaagag

SEQ ID NO: 12013 - DNA, 35 bp, Artificial Sequence
  Synthetic oligonucleotide
gccgcaaagctcgacaaatgcccgtcgtccatcgc

SEQ ID NO: 12014 - DNA, 36 bp, Artificial Sequence
  Synthetic oligonucleotide
gcgaccgtgcctggttaagatttagtgtcgaatgta

SEQ ID NO: 12015 - DNA, 37 bp, Artificial Sequence
  Synthetic oligonucleotide
gcgcaagggccataggcttccattagatcgtcctaga

SEQ ID NO: 12016 - DNA, 35 bp, Artificial Sequence
  Synthetic oligonucleotide
ggaccatgcagtcagtgcgtacaactttgcgaatt

SEQ ID NO: 12017 - DNA, 36 bp, Artificial Sequence
  Synthetic oligonucleotide
gtgagcccgcgcgcacagatgaggcatgtatatcta

SEQ ID NO: 12018 - DNA, 35 bp, Artificial Sequence
  Synthetic oligonucleotide
gtgccaaacacgtctaagcatggttcgtccatccc

SEQ ID NO: 12019 - DNA, 37 bp, Artificial Sequence
  Synthetic oligonucleotide
gtgctggacatcaaaagaattggggacgacgtgtcga

SEQ ID NO: 12020 - DNA, 36 bp, Artificial Sequence
  Synthetic oligonucleotide
gtgggccataccgagtaataagtcggactgttatta

SEQ ID NO: 12021 - DNA, 38 bp, Artificial Sequence
  Synthetic oligonucleotide
gtggggtaccgcaaagtacttagtagacgagcacttga

SEQ ID NO: 12022 - DNA, 35 bp, Artificial Sequence
  Synthetic oligonucleotide
gttcactgaccccgccgacgaattttggcctcttc

SEQ ID NO: 12023 - DNA, 38 bp, Artificial Sequence
  Synthetic oligonucleotide
tacgcacgaaggggggtccgattaatgcgctttaatga

SEQ ID NO: 12024 - DNA, 35 bp, Artificial Sequence
  Synthetic oligonucleotide
tagtgcacgccgaacgtccttccacgcccatgtcc

SEQ ID NO: 12025 - DNA, 38 bp, Artificial Sequence
  Synthetic oligonucleotide
tagtgccagtcagcatggataattacgcatgtaattga

SEQ ID NO: 12026 - DNA, 38 bp, Artificial Sequence
  Synthetic oligonucleotide
tatgacggggtgcaatctcaagtgacgtggctagatga

SEQ ID NO: 12027 - DNA, 36 bp, Artificial Sequence
  Synthetic oligonucleotide
tcacaaacgttcacactgaccccgaataaaccgtca

SEQ ID NO: 12028 - DNA, 37 bp, Artificial Sequence
  Synthetic oligonucleotide
tccacagcacgaggtgataccccctgttatcgactga

SEQ ID NO: 12029 - DNA, 37 bp, Artificial Sequence
  Synthetic oligonucleotide
tcccagcaaacgggagttacaagggtatcgtaatgga

SEQ ID NO: 12030 - DNA, 37 bp, Artificial Sequence
  Synthetic oligonucleotide
tgcacagccccagtgccacgagactgatgggcttgga

SEQ ID NO: 12031 - DNA, 36 bp, Artificial Sequence
  Synthetic oligonucleotide
tgtgcgagggaagtctataccgcgcacaacgtcgta

SEQ ID NO: 12032 - DNA, 35 bp, Artificial Sequence
  Synthetic oligonucleotide
ttgccatgccgccgttcaataggattatttcgttt

SEQ ID NO: 12033 - DNA, 37 bp, Artificial Sequence
  Synthetic oligonucleotide
ttggactgcaggctgctcgacatgttacaggcactga

SEQ ID NO: 12034 - DNA, 37 bp, Artificial Sequence
  Synthetic oligonucleotide
aacaacaggaggcagacactgtaataatcggtgacga

SEQ ID NO: 12035 - DNA, 37 bp, Artificial Sequence
  Synthetic oligonucleotide
aacacacgtcgggatatgaaggcacgatccgttacga

SEQ ID NO: 12036 - DNA, 38 bp, Artificial Sequence
  Synthetic oligonucleotide
aaccagccgggccacatgaacgaacggatgctctgtga

SEQ ID NO: 12037 - DNA, 36 bp, Artificial Sequence
  Synthetic oligonucleotide
acacagaggcccgacgtaaggcattgcgctgaagca

SEQ ID NO: 12038 - DNA, 37 bp, Artificial Sequence
  Synthetic oligonucleotide
acaccgggagggatgggtatttgggagacgaggaaga

SEQ ID NO: 12039 - DNA, 35 bp, Artificial Sequence
  Synthetic oligonucleotide
accgacagacagtataacgcgagagggaagccaga

SEQ ID NO: 12040 - DNA, 36 bp, Artificial Sequence
  Synthetic oligonucleotide
acgcacggccacaggtatctttatatggaactgtta

SEQ ID NO: 12041 - DNA, 35 bp, Artificial Sequence
  Synthetic oligonucleotide
agcacatggccggggtcgtatgactggacgtgcta

SEQ ID NO: 12042 - DNA, 38 bp, Artificial Sequence
  Synthetic oligonucleotide
atgccaggcgagccatggcgcagtactcaccgtcgtga

SEQ ID NO: 12043 - DNA, 36 bp, Artificial Sequence
  Synthetic oligonucleotide
atgctaggagcacgaacgcgaaataggaaggtttta

SEQ ID NO: 12044 - DNA, 38 bp, Artificial Sequence
  Synthetic oligonucleotide
atgctcgagagggtcacgagcgagttcgatccacatga

SEQ ID NO: 12045 - DNA, 35 bp, Artificial Sequence
  Synthetic oligonucleotide
atgggccaagtgcagttatgcgatcgttctgattt

SEQ ID NO: 12046 - DNA, 36 bp, Artificial Sequence
  Synthetic oligonucleotide
cacactgtaggtgtgtgctggtagatataagtgaca

SEQ ID NO: 12047 - DNA, 37 bp, Artificial Sequence
  Synthetic oligonucleotide
gaacaggaacaaccaagtcgtagaaagcaaaggggga

SEQ ID NO: 12048 - DNA, 35 bp, Artificial Sequence
  Synthetic oligonucleotide
gaatcaacacaccattcaatagtcaggggcggtcc

SEQ ID NO: 12049 - DNA, 35 bp, Artificial Sequence
  Synthetic oligonucleotide
gacacacggtcctctgagcacctctgacaccatgt

SEQ ID NO: 12050 - DNA, 35 bp, Artificial Sequence
  Synthetic oligonucleotide
gacatcacacgcgagttaggtagttaagtgatttg

SEQ ID NO: 12051 - DNA, 35 bp, Artificial Sequence
  Synthetic oligonucleotide
gacatgacgtctgcaagaactacagcatttgtaat

SEQ ID NO: 12052 - DNA, 37 bp, Artificial Sequence
  Synthetic oligonucleotide
gaccagcccatgcaggccaggtggtatcgaattacga

SEQ ID NO: 12053 - DNA, 36 bp, Artificial Sequence
  Synthetic oligonucleotide
gacgacgcctaatggtcccagcttccaggtatccta

SEQ ID NO: 12054 - DNA, 36 bp, Artificial Sequence
  Synthetic oligonucleotide
gacgtgcgcaggactaggtgactaagcaaacagtga

SEQ ID NO: 12055 - DNA, 35 bp, Artificial Sequence
  Synthetic oligonucleotide
gactgcccatcccgtgaagggcgacgacacgtttt

SEQ ID NO: 12056 - DNA, 37 bp, Artificial Sequence
  Synthetic oligonucleotide
gactggcatcagtcggactgctcggagatgtctgaga

SEQ ID NO: 12057 - DNA, 36 bp, Artificial Sequence
  Synthetic oligonucleotide
gcaccacgagcgtaaatggccatacttttgttgaga

SEQ ID NO: 12058 - DNA, 35 bp, Artificial Sequence
  Synthetic oligonucleotide
gcacgactcgcacgcaacagaacctcgacccgtcc

SEQ ID NO: 12059 - DNA, 36 bp, Artificial Sequence
  Synthetic oligonucleotide
gccaaaacaatcagcctatctgtcgtcaaaagacta

SEQ ID NO: 12060 - DNA, 38 bp, Artificial Sequence
  Synthetic oligonucleotide
gccaaaccgtcgtgtagtggcataggtagcatgcgtga

SEQ ID NO: 12061 - DNA, 35 bp, Artificial Sequence
  Synthetic oligonucleotide
gccacgcatctgggcttacgcatgtcctttcagtt

SEQ ID NO: 12062 - DNA, 35 bp, Artificial Sequence
  Synthetic oligonucleotide
gccagaacgtacatgtgtctgcatcaaccaccacc

SEQ ID NO: 12063 - DNA, 36 bp, Artificial Sequence
  Synthetic oligonucleotide
gcccggtgagcaaaaggcgtaagtatcagagtgtga

SEQ ID NO: 12064 - DNA, 35 bp, Artificial Sequence
  Synthetic oligonucleotide
gcgaacaacacatcagccgaactgcgcacaacgca

SEQ ID NO: 12065 - DNA, 36 bp, Artificial Sequence
  Synthetic oligonucleotide
gcgatgccccgaagaagcgagtttcagcttcaaggt

SEQ ID NO: 12066 - DNA, 34 bp, Artificial Sequence
  Synthetic oligonucleotide
gcgcgagcactgctgcgaataagtcgtgttgaaa

SEQ ID NO: 12067 - DNA, 35 bp, Artificial Sequence
  Synthetic oligonucleotide
gctcacacggtcccctcatagtcacacttcaggca

SEQ ID NO: 12068 - DNA, 37 bp, Artificial Sequence
  Synthetic oligonucleotide
gctgccgaaaagtgatgactgacgttgggacggaaga

SEQ ID NO: 12069 - DNA, 36 bp, Artificial Sequence
  Synthetic oligonucleotide
ggaccggacggacccccggacagtgatcgtcctaaa

SEQ ID NO: 12070 - DNA, 36 bp, Artificial Sequence
  Synthetic oligonucleotide
ggactggtacccatgctcatcaccgctcctacgata

SEQ ID NO: 12071 - DNA, 37 bp, Artificial Sequence
  Synthetic oligonucleotide
gtcacaccgcagctaagacccccagacattctgtcaa

SEQ ID NO: 12072 - DNA, 35 bp, Artificial Sequence
  Synthetic oligonucleotide
gtcacctcccgcccgatcggcaaggacaagtcata

SEQ ID NO: 12073 - DNA, 36 bp, Artificial Sequence
  Synthetic oligonucleotide
gtgacgaacggccacgatgtaacgattcaatgctta

SEQ ID NO: 12074 - DNA, 37 bp, Artificial Sequence
  Synthetic oligonucleotide
gtgtgggcccagtgatatatgatcagttgcttacaga

SEQ ID NO: 12075 - DNA, 37 bp, Artificial Sequence
  Synthetic oligonucleotide
gttgcagtaggggcgagagggagggagggtgtatcga

SEQ ID NO: 12076 - DNA, 35 bp, Artificial Sequence
  Synthetic oligonucleotide
gttgcccgcctggatgttgtcctttcaccacgtgt

SEQ ID NO: 12077 - DNA, 36 bp, Artificial Sequence
  Synthetic oligonucleotide
taccaggccagtcgaagggtgtcgtgtgaggcgtta

SEQ ID NO: 12078 - DNA, 35 bp, Artificial Sequence
  Synthetic oligonucleotide
tagcacaccagagtgcgtctgtaaacccgtaaact

SEQ ID NO: 12079 - DNA, 37 bp, Artificial Sequence
  Synthetic oligonucleotide
tagccactgcagaacgtttggtgggaacagtacgcga

SEQ ID NO: 12080 - DNA, 37 bp, Artificial Sequence
  Synthetic oligonucleotide
tatccccgcatgccacgatgtacggctcccgttagga

SEQ ID NO: 12081 - DNA, 37 bp, Artificial Sequence
  Synthetic oligonucleotide
tccacagatcggtgtcagacgtctcaggcgtacgaga

SEQ ID NO: 12082 - DNA, 38 bp, Artificial Sequence
  Synthetic oligonucleotide
tccaccccagtccctccaactctgtcacccatacgtga

SEQ ID NO: 12083 - DNA, 37 bp, Artificial Sequence
  Synthetic oligonucleotide
tcccacccacaccactcgttagtcacagtctcaacga

SEQ ID NO: 12084 - DNA, 35 bp, Artificial Sequence
  Synthetic oligonucleotide
tgacaactcagatgtggctgcgtacctccatgctc

SEQ ID NO: 12085 - DNA, 36 bp, Artificial Sequence
  Synthetic oligonucleotide
tgaccgccaaacgtcaaatcaggatcctcccaccca

SEQ ID NO: 12086 - DNA, 37 bp, Artificial Sequence
  Synthetic oligonucleotide
tgacggtaagcatgttaaggtgtgggatagtctcaga

SEQ ID NO: 12087 - DNA, 37 bp, Artificial Sequence
  Synthetic oligonucleotide
tgcatggtgcagaagatagttcgggtgtagttagaga

SEQ ID NO: 12088 - DNA, 36 bp, Artificial Sequence
  Synthetic oligonucleotide
tgccacggggcaatcactggtctcaagtcgagtgta

SEQ ID NO: 12089 - DNA, 37 bp, Artificial Sequence
  Synthetic oligonucleotide
tgcccgcgaacggttccttgcacgtgaagtataacga

SEQ ID NO: 12090 - DNA, 36 bp, Artificial Sequence
  Synthetic oligonucleotide
tgcgaacgacaatgcttgtaatgaggtcgtgactga

SEQ ID NO: 12091 - DNA, 38 bp, Artificial Sequence
  Synthetic oligonucleotide
tgcgacaccaggattgcgaaacaccactctaaccatga

SEQ ID NO: 12092 - DNA, 35 bp, Artificial Sequence
  Synthetic oligonucleotide
tgtgcacccctgttccgaatcatcgtgaggccacg

SEQ ID NO: 12093 - DNA, 36 bp, Artificial Sequence
  Synthetic oligonucleotide
aaccccacacacgcacggtagagacgtatggaacaa

SEQ ID NO: 12094 - DNA, 37 bp, Artificial Sequence
  Synthetic oligonucleotide
aacgacgggcgtatcagcggatagatctaagtcagga

SEQ ID NO: 12095 - DNA, 38 bp, Artificial Sequence
  Synthetic oligonucleotide
acaaccaccgggccaaccccacctgccgccgatgctga

SEQ ID NO: 12096 - DNA, 36 bp, Artificial Sequence
  Synthetic oligonucleotide
acaccacgccggagggttgatgcgtttgtctacaca

SEQ ID NO: 12097 - DNA, 36 bp, Artificial Sequence
  Synthetic oligonucleotide
acaccattcacgccgaggccgatccccagacatgga

SEQ ID NO: 12098 - DNA, 35 bp, Artificial Sequence
  Synthetic oligonucleotide
acacgccgccagagtacgtccgggatcacttgctt

SEQ ID NO: 12099 - DNA, 35 bp, Artificial Sequence
  Synthetic oligonucleotide
accacgaccgcaagtaccctactgagacatgtgac

SEQ ID NO: 12100 - DNA, 35 bp, Artificial Sequence
  Synthetic oligonucleotide
acccacgccgttatgtataaggactagttgtgctt

SEQ ID NO: 12101 - DNA, 38 bp, Artificial Sequence
  Synthetic oligonucleotide
accgacgatcaacaggcaatggcaaagtcacttagtga

SEQ ID NO: 12102 - DNA, 37 bp, Artificial Sequence
  Synthetic oligonucleotide
accgacgccgcatgccgcgtttatagacggtcccgga

SEQ ID NO: 12103 - DNA, 37 bp, Artificial Sequence
  Synthetic oligonucleotide
accgagagggcggtcagttaaggaactcgatctgaga

SEQ ID NO: 12104 - DNA, 36 bp, Artificial Sequence
  Synthetic oligonucleotide
accgcaaccacaagtgcaccgtgtcaggtgtcgtca

SEQ ID NO: 12105 - DNA, 38 bp, Artificial Sequence
  Synthetic oligonucleotide
accgccgaatgcccggggtcgtaacgatcctgtcatga

SEQ ID NO: 12106 - DNA, 36 bp, Artificial Sequence
  Synthetic oligonucleotide
acgcatagcactagttgtgggaccactgctaaccca

SEQ ID NO: 12107 - DNA, 36 bp, Artificial Sequence
  Synthetic oligonucleotide
acgcgagagcggctttatgttagcgaggcggtgaga

SEQ ID NO: 12108 - DNA, 35 bp, Artificial Sequence
  Synthetic oligonucleotide
agcaccaccacgcggtatcacaactacgtgttacg

SEQ ID NO: 12109 - DNA, 38 bp, Artificial Sequence
  Synthetic oligonucleotide
agcgacgacaggcggaaaagtatgaggctcaagtgtga

SEQ ID NO: 12110 - DNA, 35 bp, Artificial Sequence
  Synthetic oligonucleotide
ccaatatgcatgcaacaatggtgggcgaaggcttg

SEQ ID NO: 12111 - DNA, 36 bp, Artificial Sequence
  Synthetic oligonucleotide
cgcacggcctgtcagtaagcctctcagaaattagaa

SEQ ID NO: 12112 - DNA, 37 bp, Artificial Sequence
  Synthetic oligonucleotide
gaacaccgccaacgtatgcgccaccagaacgtcatga

SEQ ID NO: 12113 - DNA, 38 bp, Artificial Sequence
  Synthetic oligonucleotide
gaagaagcgcgtagctgcatgacaagagttcccgatga

SEQ ID NO: 12114 - DNA, 35 bp, Artificial Sequence
  Synthetic oligonucleotide
gaagagcggccacgctacaactgcacacttagagg

SEQ ID NO: 12115 - DNA, 35 bp, Artificial Sequence
  Synthetic oligonucleotide
gacatcccaatgacacatcacttcgttaagtcttg

SEQ ID NO: 12116 - DNA, 35 bp, Artificial Sequence
  Synthetic oligonucleotide
gaccagctgcatagcgtattttaggcatcaggagg

SEQ ID NO: 12117 - DNA, 36 bp, Artificial Sequence
  Synthetic oligonucleotide
gaccccgaacagctaggcactacattaacattgcta

SEQ ID NO: 12118 - DNA, 37 bp, Artificial Sequence
  Synthetic oligonucleotide
gacggaactcgaagtgggtgatcatagactagatgga

SEQ ID NO: 12119 - DNA, 36 bp, Artificial Sequence
  Synthetic oligonucleotide
gacgggcctgtccttggatgtagttagaacatacaa

SEQ ID NO: 12120 - DNA, 37 bp, Artificial Sequence
  Synthetic oligonucleotide
gacgtgcaaacgttacgttcggttcttatagccaaga

SEQ ID NO: 12121 - DNA, 38 bp, Artificial Sequence
  Synthetic oligonucleotide
gagcatggcacaggttgtagcgatcgaccgtgatgtga

SEQ ID NO: 12122 - DNA, 37 bp, Artificial Sequence
  Synthetic oligonucleotide
gagggcggtgagatagggtctcttccaacagaaacga

SEQ ID NO: 12123 - DNA, 36 bp, Artificial Sequence
  Synthetic oligonucleotide
gagtcaccgccgcgcacgaacaggcttgcttgccca

SEQ ID NO: 12124 - DNA, 35 bp, Artificial Sequence
  Synthetic oligonucleotide
gatgcgccgtagtgcagtcagacaattgggtaacc

SEQ ID NO: 12125 - DNA, 36 bp, Artificial Sequence
  Synthetic oligonucleotide
gatgtggagcagggaggtgcgtgctgctgcatataa

SEQ ID NO: 12126 - DNA, 36 bp, Artificial Sequence
  Synthetic oligonucleotide
gcaacaccaggaaggccagagcagttatgtggtcaa

SEQ ID NO: 12127 - DNA, 35 bp, Artificial Sequence
  Synthetic oligonucleotide
gcaacctacgaacatttctcgccagaagtctcgct

SEQ ID NO: 12128 - DNA, 36 bp, Artificial Sequence
  Synthetic oligonucleotide
gcacacgttaacccactcttgccttggacctacgga

SEQ ID NO: 12129 - DNA, 36 bp, Artificial Sequence
  Synthetic oligonucleotide
gcacatcctgaacgtggtactcattcaactgactca

SEQ ID NO: 12130 - DNA, 37 bp, Artificial Sequence
  Synthetic oligonucleotide
gcacggagaggaaacggagaacgtcttttggtatgga

SEQ ID NO: 12131 - DNA, 38 bp, Artificial Sequence
  Synthetic oligonucleotide
gccgagaccacgctgagataagaatgctgtctgtgtga

SEQ ID NO: 12132 - DNA, 38 bp, Artificial Sequence
  Synthetic oligonucleotide
gcgaactgcggtgctcgtggggaacggacgcagtttga

SEQ ID NO: 12133 - DNA, 35 bp, Artificial Sequence
  Synthetic oligonucleotide
gcgacttgccgtaccgatcacacaatgacttattg

SEQ ID NO: 12134 - DNA, 36 bp, Artificial Sequence
  Synthetic oligonucleotide
gcgcacccctgacatctgtgtcgcccagatcagtta

SEQ ID NO: 12135 - DNA, 35 bp, Artificial Sequence
  Synthetic oligonucleotide
gctgcccgagcagatcgtaccttgtccccccccca

SEQ ID NO: 12136 - DNA, 37 bp, Artificial Sequence
  Synthetic oligonucleotide
gctgggcggaatggcgataaagttttctagttcctga

SEQ ID NO: 12137 - DNA, 35 bp, Artificial Sequence
  Synthetic oligonucleotide
gtcaaggccacgagcttatgttgatccacgtaccg

SEQ ID NO: 12138 - DNA, 36 bp, Artificial Sequence
  Synthetic oligonucleotide
gtcgatgccaggacacggtcggataggtattcgcca

SEQ ID NO: 12139 - DNA, 35 bp, Artificial Sequence
  Synthetic oligonucleotide
gtgacacgacgggatagtgagtgacgtgctaaggt

SEQ ID NO: 12140 - DNA, 35 bp, Artificial Sequence
  Synthetic oligonucleotide
tacgaaacaggcgtcgctacttccacaacaccagt

SEQ ID NO: 12141 - DNA, 37 bp, Artificial Sequence
  Synthetic oligonucleotide
tagacatcatgctcaaacgattatacaccaactccga

SEQ ID NO: 12142 - DNA, 35 bp, Artificial Sequence
  Synthetic oligonucleotide
tagcacccgcagaaagtgatcgatcatccttacac

SEQ ID NO: 12143 - DNA, 37 bp, Artificial Sequence
  Synthetic oligonucleotide
tagtagccgttaacagtcgcggtcatatatggatcga

SEQ ID NO: 12144 - DNA, 37 bp, Artificial Sequence
  Synthetic oligonucleotide
tagtgcgccacattcgcgttccagatacggttggcga

SEQ ID NO: 12145 - DNA, 38 bp, Artificial Sequence
  Synthetic oligonucleotide
tatgcaccaggagtgagcaatctggccggtgcgaatga

SEQ ID NO: 12146 - DNA, 32 bp, Artificial Sequence
  Synthetic oligonucleotide
tatgccgagaaaacaatgtaaccgagtagatt

SEQ ID NO: 12147 - DNA, 35 bp, Artificial Sequence
  Synthetic oligonucleotide
tcaacacgcagggtgtcgtatggagcccctcaatg

SEQ ID NO: 12148 - DNA, 37 bp, Artificial Sequence
  Synthetic oligonucleotide
tcaccatgcggagtgtaattgaggatccttggaagga

SEQ ID NO: 12149 - DNA, 38 bp, Artificial Sequence
  Synthetic oligonucleotide
tcacgaggactgcacttaagccagacgaacttcattga

SEQ ID NO: 12150 - DNA, 35 bp, Artificial Sequence
  Synthetic oligonucleotide
tcatcccaccgtccttcatctatgtcgtaatcact

SEQ ID NO: 12151 - DNA, 35 bp, Artificial Sequence
  Synthetic oligonucleotide
tcccaacagtcagcacgttacaacgcacgttatcg

SEQ ID NO: 12152 - DNA, 36 bp, Artificial Sequence
  Synthetic oligonucleotide
tccgccaggcatcgcttccgagtaacaaatgcatga

SEQ ID NO: 12153 - DNA, 38 bp, Artificial Sequence
  Synthetic oligonucleotide
tgcacagtcaaaggggggtagagaggatgacggtatga

SEQ ID NO: 12154 - DNA, 37 bp, Artificial Sequence
  Synthetic oligonucleotide
tgcgaccgcccccgtaaagtgcatgttttaggtaaga

SEQ ID NO: 12155 - DNA, 35 bp, Artificial Sequence
  Synthetic oligonucleotide
tgtcaccaggaagacccccagaaagtcgatagtaa

SEQ ID NO: 12156 - DNA, 35 bp, Artificial Sequence
  Synthetic oligonucleotide
aacaaccagagtgagcaactgtagaatgcggggta

SEQ ID NO: 12157 - DNA, 36 bp, Artificial Sequence
  Synthetic oligonucleotide
aacacgcctcgaccacccgacaagcacaatgactca

SEQ ID NO: 12158 - DNA, 37 bp, Artificial Sequence
  Synthetic oligonucleotide
aacgacgcaacgacggatgcggcgcaattgctaggga

SEQ ID NO: 12159 - DNA, 35 bp, Artificial Sequence
  Synthetic oligonucleotide
acacatgcccagagagatcctcccagctatacgta

SEQ ID NO: 12160 - DNA, 35 bp, Artificial Sequence
  Synthetic oligonucleotide
acaccacgccacgtgttcgatcacggattcggcac

SEQ ID NO: 12161 - DNA, 37 bp, Artificial Sequence
  Synthetic oligonucleotide
acaccccgccctgaatcatcataatttcgacagtcga

SEQ ID NO: 12162 - DNA, 35 bp, Artificial Sequence
  Synthetic oligonucleotide
acacgcggaccggaaatccgtggacaatttatcac

SEQ ID NO: 12163 - DNA, 35 bp, Artificial Sequence
  Synthetic oligonucleotide
acatcaatcgcagatcatgcatccacatcacctcc

SEQ ID NO: 12164 - DNA, 36 bp, Artificial Sequence
  Synthetic oligonucleotide
accaaccccatcagtaccatgtctttccatgcacga

SEQ ID NO: 12165 - DNA, 35 bp, Artificial Sequence
  Synthetic oligonucleotide
accacgcaatactggtatcatgagaatgcatagga

SEQ ID NO: 12166 - DNA, 37 bp, Artificial Sequence
  Synthetic oligonucleotide
accactcgacaccctctctatcttaagtcgtctccga

SEQ ID NO: 12167 - DNA, 35 bp, Artificial Sequence
  Synthetic oligonucleotide
accgcgcatagagtgaggtagccgcgtaagctaat

SEQ ID NO: 12168 - DNA, 37 bp, Artificial Sequence
  Synthetic oligonucleotide
atccacgctggctgcagtggccaaactctatcgtaga

SEQ ID NO: 12169 - DNA, 35 bp, Artificial Sequence
  Synthetic oligonucleotide
gaacccaccgccaacgcacgtactcgtcacgtaat

SEQ ID NO: 12170 - DNA, 35 bp, Artificial Sequence
  Synthetic oligonucleotide
gaacctgcatcaacgtttatattccattggatggg

SEQ ID NO: 12171 - DNA, 36 bp, Artificial Sequence
  Synthetic oligonucleotide
gaagaggcggacggatcattagttgtggcattgcta

SEQ ID NO: 12172 - DNA, 37 bp, Artificial Sequence
  Synthetic oligonucleotide
gaatcaccgaagacccgaaacctgctcgcacgctaga

SEQ ID NO: 12173 - DNA, 34 bp, Artificial Sequence
  Synthetic oligonucleotide
gacaaagcacagggttcgggcacgattatgacac

SEQ ID NO: 12174 - DNA, 37 bp, Artificial Sequence
  Synthetic oligonucleotide
gacaacgtgcggtgttacaatcatgcagctgatatga

SEQ ID NO: 12175 - DNA, 33 bp, Artificial Sequence
  Synthetic oligonucleotide
gacacagcacgctatactcagattaaccggatc

SEQ ID NO: 12176 - DNA, 38 bp, Artificial Sequence
  Synthetic oligonucleotide
gacacggaggacggtacaagtatagagtctctgactga

SEQ ID NO: 12177 - DNA, 35 bp, Artificial Sequence
  Synthetic oligonucleotide
gacacggagttgtgaatatcccaataactaaggct

SEQ ID NO: 12178 - DNA, 36 bp, Artificial Sequence
  Synthetic oligonucleotide
gaccaaccgcagtattgaacagagggacacgtctga

SEQ ID NO: 12179 - DNA, 36 bp, Artificial Sequence
  Synthetic oligonucleotide
gacccagccgtacaatgaaggctcgacgtatagcta

SEQ ID NO: 12180 - DNA, 38 bp, Artificial Sequence
  Synthetic oligonucleotide
gacctgcatggggtatgtatcgtgaaaattctgattga

SEQ ID NO: 12181 - DNA, 35 bp, Artificial Sequence
  Synthetic oligonucleotide
gacgcaacagtctgcctgaggaggcgagggcatcc

SEQ ID NO: 12182 - DNA, 37 bp, Artificial Sequence
  Synthetic oligonucleotide
gacgccaagagtgctacatatgtcccgtctccggtga

SEQ ID NO: 12183 - DNA, 35 bp, Artificial Sequence
  Synthetic oligonucleotide
gacgcgaatggtaacgatgaagttgcatcatgcta

SEQ ID NO: 12184 - DNA, 37 bp, Artificial Sequence
  Synthetic oligonucleotide
gacgtccacagagcgtacttttagttctcggggttga

SEQ ID NO: 12185 - DNA, 37 bp, Artificial Sequence
  Synthetic oligonucleotide
gagcacagcatctgaagctgagttagctcaccactga

SEQ ID NO: 12186 - DNA, 35 bp, Artificial Sequence
  Synthetic oligonucleotide
gatacgcgcagtacgagcatgacgtgaaatcgatg

SEQ ID NO: 12187 - DNA, 37 bp, Artificial Sequence
  Synthetic oligonucleotide
gatccccgcgccaatgcatctggaggcctcccgtcga

SEQ ID NO: 12188 - DNA, 33 bp, Artificial Sequence
  Synthetic oligonucleotide
gatgcggtacgtcaaaaggagcctggttaccat

SEQ ID NO: 12189 - DNA, 36 bp, Artificial Sequence
  Synthetic oligonucleotide
gcacaccaccgtatgttgcgtgctaatgaaccctca

SEQ ID NO: 12190 - DNA, 36 bp, Artificial Sequence
  Synthetic oligonucleotide
gcacaccgcctcaacctcgtacaagggacgcgacaa

SEQ ID NO: 12191 - DNA, 36 bp, Artificial Sequence
  Synthetic oligonucleotide
gcaccaaccaggagtgatgagttccagcctcatgta

SEQ ID NO: 12192 - DNA, 35 bp, Artificial Sequence
  Synthetic oligonucleotide
gccacaccacattccactcacacccaatactacac

SEQ ID NO: 12193 - DNA, 37 bp, Artificial Sequence
  Synthetic oligonucleotide
gcccaaatcattacgcatacgacggtcccctttacga

SEQ ID NO: 12194 - DNA, 36 bp, Artificial Sequence
  Synthetic oligonucleotide
gcccagcgggagcgaacgcgcaacgtgtcatcaaaa

SEQ ID NO: 12195 - DNA, 36 bp, Artificial Sequence
  Synthetic oligonucleotide
gcccccgatcacactgcaacgtcacagaaccccgga

SEQ ID NO: 12196 - DNA, 36 bp, Artificial Sequence
  Synthetic oligonucleotide
gccgacggattcgttactgactatagctcctggcga

SEQ ID NO: 12197 - DNA, 37 bp, Artificial Sequence
  Synthetic oligonucleotide
gccggactgcaggagatgtagttaagtgccccactga

SEQ ID NO: 12198 - DNA, 35 bp, Artificial Sequence
  Synthetic oligonucleotide
gccggtgcagaaggcttcggaagtaccttttgttg

SEQ ID NO: 12199 - DNA, 36 bp, Artificial Sequence
  Synthetic oligonucleotide
gcgaagcacgtaggacaggcaacacgacaaaacata

SEQ ID NO: 12200 - DNA, 35 bp, Artificial Sequence
  Synthetic oligonucleotide
gggacgaatcccaattcgtcctggcttcatgcctt

SEQ ID NO: 12201 - DNA, 36 bp, Artificial Sequence
  Synthetic oligonucleotide
gggacgcaagtgctaaacctcattcaagggcaccga

SEQ ID NO: 12202 - DNA, 35 bp, Artificial Sequence
  Synthetic oligonucleotide
gtacaccgcagaagttgaacgtcctgtattgccgc

SEQ ID NO: 12203 - DNA, 36 bp, Artificial Sequence
  Synthetic oligonucleotide
gtacccaccacacatgtctccagtcacgctctgcca

SEQ ID NO: 12204 - DNA, 35 bp, Artificial Sequence
  Synthetic oligonucleotide
gtcgccgcccacgagcatgcgttacaactctagtc

SEQ ID NO: 12205 - DNA, 38 bp, Artificial Sequence
  Synthetic oligonucleotide
gtgaacggtacaaagcgcattgcagtaggactcactga

SEQ ID NO: 12206 - DNA, 36 bp, Artificial Sequence
  Synthetic oligonucleotide
gttgcgagcatgcttcccctcaaatgacgctacaca

SEQ ID NO: 12207 - DNA, 35 bp, Artificial Sequence
  Synthetic oligonucleotide
taacacacgcgttgcacccgtacactttagacatg

SEQ ID NO: 12208 - DNA, 37 bp, Artificial Sequence
  Synthetic oligonucleotide
taacccacccgacccagcgactaagcttgcctacgga

SEQ ID NO: 12209 - DNA, 37 bp, Artificial Sequence
  Synthetic oligonucleotide
tacccagcacccccgtgcccccaaatctgcagaccta

SEQ ID NO: 12210 - DNA, 35 bp, Artificial Sequence
  Synthetic oligonucleotide
tcacaaccgcagtcctaagagatcgcaacaataat

SEQ ID NO: 12211 - DNA, 36 bp, Artificial Sequence
  Synthetic oligonucleotide
tcacaacgcggatgacatgcgcactgacttgattca

SEQ ID NO: 12212 - DNA, 36 bp, Artificial Sequence
  Synthetic oligonucleotide
tcacaacgggtctgccagatcctcctacccgaacaa

SEQ ID NO: 12213 - DNA, 37 bp, Artificial Sequence
  Synthetic oligonucleotide
tcccacgtccaagcaccgatcgttctgacttcccaga

SEQ ID NO: 12214 - DNA, 35 bp, Artificial Sequence
  Synthetic oligonucleotide
tccgcccagtcggaagggcatggctaggtgttcct

SEQ ID NO: 12215 - DNA, 36 bp, Artificial Sequence
  Synthetic oligonucleotide
tctgacccccaggacatagagtccggctgtgaggta

SEQ ID NO: 12216 - DNA, 37 bp, Artificial Sequence
  Synthetic oligonucleotide
tgcgaagcaggaagtgctcacctagattaacatcgga

SEQ ID NO: 12217 - DNA, 36 bp, Artificial Sequence
  Synthetic oligonucleotide
tgttgacgccggtaaacaactgtccgagctcggaga

SEQ ID NO: 12218 - DNA, 37 bp, Artificial Sequence
  Synthetic oligonucleotide
ttcagcaaacgtcgcggcctttgtatggaagctgaga

SEQ ID NO: 12219 - DNA, 36 bp, Artificial Sequence
  Synthetic oligonucleotide
ttgcgaggacatccgtagtgctgctctaaccttaca

SEQ ID NO: 12220 - DNA, 37 bp, Artificial Sequence
  Synthetic oligonucleotide
aacccgcggtggaagtcggttcaagagcacataggga

SEQ ID NO: 12221 - DNA, 37 bp, Artificial Sequence
  Synthetic oligonucleotide
aacgacgcaactgtcacgtgcttaaacatagcctaga

SEQ ID NO: 12222 - DNA, 37 bp, Artificial Sequence
  Synthetic oligonucleotide
acacccccgaagtagtgccagatactgcgggtactga

SEQ ID NO: 12223 - DNA, 38 bp, Artificial Sequence
  Synthetic oligonucleotide
acccacgcacacatttgcgtcaaccgacgacgtcatga

SEQ ID NO: 12224 - DNA, 38 bp, Artificial Sequence
  Synthetic oligonucleotide
accgcaaggtcgtactgaccgcaaacatacacgcttga

SEQ ID NO: 12225 - DNA, 37 bp, Artificial Sequence
  Synthetic oligonucleotide
accgtgaaggcctccctgaaataaaggaatagcggaa

SEQ ID NO: 12226 - DNA, 37 bp, Artificial Sequence
  Synthetic oligonucleotide
acgaaccggtccgttctactgtacaccttttgttgga

SEQ ID NO: 12227 - DNA, 36 bp, Artificial Sequence
  Synthetic oligonucleotide
agacccaccccgcgcgcaagtcagcacatttcctca

SEQ ID NO: 12228 - DNA, 35 bp, Artificial Sequence
  Synthetic oligonucleotide
agtgcgcacgtaacgtacctgttcgcaataattgt

SEQ ID NO: 12229 - DNA, 35 bp, Artificial Sequence
  Synthetic oligonucleotide
atcacgcaggtctagcctaaaaaaccccacgcctc

SEQ ID NO: 12230 - DNA, 37 bp, Artificial Sequence
  Synthetic oligonucleotide
attgcacaagttgataacggggtcaggatcgaggaga

SEQ ID NO: 12231 - DNA, 36 bp, Artificial Sequence
  Synthetic oligonucleotide
gaacgcataccgaatagacgatcaaagtgcagttca

SEQ ID NO: 12232 - DNA, 37 bp, Artificial Sequence
  Synthetic oligonucleotide
gacaaaagcacatgggtaagctgcgctatgctaggga

SEQ ID NO: 12233 - DNA, 35 bp, Artificial Sequence
  Synthetic oligonucleotide
gacacggggaagcgtatcacgccattgaacctcat

SEQ ID NO: 12234 - DNA, 35 bp, Artificial Sequence
  Synthetic oligonucleotide
gacactcgcggtctctcgacaaactatcgcctagc

SEQ ID NO: 12235 - DNA, 38 bp, Artificial Sequence
  Synthetic oligonucleotide
gaccacaccgcgaacgtactcgatgtgatcgatcttga

SEQ ID NO: 12236 - DNA, 37 bp, Artificial Sequence
  Synthetic oligonucleotide
gaccacccaacgttcacgaagcgaacaccttccacga

SEQ ID NO: 12237 - DNA, 38 bp, Artificial Sequence
  Synthetic oligonucleotide
gaccacggtagaagtgggaacaccgactggtggcttga

SEQ ID NO: 12238 - DNA, 35 bp, Artificial Sequence
  Synthetic oligonucleotide
gaccatgcccaaaggtcctatttcacgcgttgacg

SEQ ID NO: 12239 - DNA, 38 bp, Artificial Sequence
  Synthetic oligonucleotide
gaccatgggggcacggacggggtaaggcggacaagtga

SEQ ID NO: 12240 - DNA, 37 bp, Artificial Sequence
  Synthetic oligonucleotide
gacgaacctcagccagagaagaagacggcttatcgga

SEQ ID NO: 12241 - DNA, 36 bp, Artificial Sequence
  Synthetic oligonucleotide
gacgacgcaaagtgcacttagacgtagggtgatgaa

SEQ ID NO: 12242 - DNA, 35 bp, Artificial Sequence
  Synthetic oligonucleotide
gacgctgtccgccataggactgtttcgaggcaaat

SEQ ID NO: 12243 - DNA, 38 bp, Artificial Sequence
  Synthetic oligonucleotide
gacggaaccacaggcatgggacgcataatgcataatga

SEQ ID NO: 12244 - DNA, 35 bp, Artificial Sequence
  Synthetic oligonucleotide
gagacgggcggagtttgttgttaattgggtgggcg

SEQ ID NO: 12245 - DNA, 35 bp, Artificial Sequence
  Synthetic oligonucleotide
gagcaccaccgcgaaacgcatcaacttgacgttta

SEQ ID NO: 12246 - DNA, 37 bp, Artificial Sequence
  Synthetic oligonucleotide
gagtgctgcagaaatcactcattgacattcactgtta

SEQ ID NO: 12247 - DNA, 35 bp, Artificial Sequence
  Synthetic oligonucleotide
gcaaccaagcaccagcatcgaccccgctttgcatg

SEQ ID NO: 12248 - DNA, 36 bp, Artificial Sequence
  Synthetic oligonucleotide
gcacaacacatatctccgcaagtgattcccagatca

SEQ ID NO: 12249 - DNA, 35 bp, Artificial Sequence
  Synthetic oligonucleotide
gcacacgcaggatgtccgaatactcgaagcctatg

SEQ ID NO: 12250 - DNA, 37 bp, Artificial Sequence
  Synthetic oligonucleotide
gcaccgagaggttgcaaataggcgagagaacgttgga

SEQ ID NO: 12251 - DNA, 35 bp, Artificial Sequence
  Synthetic oligonucleotide
gcataccgggagtgttggtttacactgatgtacta

SEQ ID NO: 12252 - DNA, 35 bp, Artificial Sequence
  Synthetic oligonucleotide
gcatgcacaagcgcggatcaaagatgattgttgta

SEQ ID NO: 12253 - DNA, 36 bp, Artificial Sequence
  Synthetic oligonucleotide
gccacaccgatcgtggctctgcggcagaatagcaca

SEQ ID NO: 12254 - DNA, 38 bp, Artificial Sequence
  Synthetic oligonucleotide
gccagcacagcaaaaaggtatgcgcacgagttcaatga

SEQ ID NO: 12255 - DNA, 35 bp, Artificial Sequence
  Synthetic oligonucleotide
gcctagcacgcctcataaacaggcactactaatct

SEQ ID NO: 12256 - DNA, 36 bp, Artificial Sequence
  Synthetic oligonucleotide
gcgcacaccacttacactacagttaggtctcattaa

SEQ ID NO: 12257 - DNA, 37 bp, Artificial Sequence
  Synthetic oligonucleotide
gctagctcatactgaccccgctttatctgttcttcga

SEQ ID NO: 12258 - DNA, 37 bp, Artificial Sequence
  Synthetic oligonucleotide
gtcaacgacagctatccgacctcgagacgtttctaga

SEQ ID NO: 12259 - DNA, 35 bp, Artificial Sequence
  Synthetic oligonucleotide
gtggagctggaagggtatatcgcctacccgtctcg

SEQ ID NO: 12260 - DNA, 36 bp, Artificial Sequence
  Synthetic oligonucleotide
gtggtgagggcgcgcttggttagcccgtaattgaga

SEQ ID NO: 12261 - DNA, 35 bp, Artificial Sequence
  Synthetic oligonucleotide
tacacgcccagtatgaaacgatcctaaccttccac

SEQ ID NO: 12262 - DNA, 35 bp, Artificial Sequence
  Synthetic oligonucleotide
tacatgccggcggaatggacgcattaagtcgccta

SEQ ID NO: 12263 - DNA, 38 bp, Artificial Sequence
  Synthetic oligonucleotide
tacgacgcgcaggtaggctcgtaggacggtgtgggtga

SEQ ID NO: 12264 - DNA, 37 bp, Artificial Sequence
  Synthetic oligonucleotide
taggaccgcttcagtgtgtctgtcctttagccgttga

SEQ ID NO: 12265 - DNA, 36 bp, Artificial Sequence
  Synthetic oligonucleotide
tatgcgccgaacatacacggaccggggtgtatgtga

SEQ ID NO: 12266 - DNA, 35 bp, Artificial Sequence
  Synthetic oligonucleotide
tcaacgcgacgatctatacagtcttgctacgcatt

SEQ ID NO: 12267 - DNA, 35 bp, Artificial Sequence
  Synthetic oligonucleotide
tcacacagcagaagtggttcgctcatgctaacgtg

SEQ ID NO: 12268 - DNA, 36 bp, Artificial Sequence
  Synthetic oligonucleotide
tcaccacgtcctcaacctgctagcagacatctgtaa

SEQ ID NO: 12269 - DNA, 35 bp, Artificial Sequence
  Synthetic oligonucleotide
tcaccgttgcgagatatctcacatgcatacgcctc

SEQ ID NO: 12270 - DNA, 36 bp, Artificial Sequence
  Synthetic oligonucleotide
tcacgcaaccacacatgatccttgctcacctctaga

SEQ ID NO: 12271 - DNA, 37 bp, Artificial Sequence
  Synthetic oligonucleotide
tcacgccagagcagtatccatgtaggagtatgtccga

SEQ ID NO: 12272 - DNA, 36 bp, Artificial Sequence
  Synthetic oligonucleotide
tccgccacgaagggacggtattaaggagttttagga

SEQ ID NO: 12273 - DNA, 35 bp, Artificial Sequence
  Synthetic oligonucleotide
tcgatcgtaggtgtggagagtggtgtcacagtcga

SEQ ID NO: 12274 - DNA, 36 bp, Artificial Sequence
  Synthetic oligonucleotide
tgacatgcagttcaggtatagggaatgcacggacga

SEQ ID NO: 12275 - DNA, 38 bp, Artificial Sequence
  Synthetic oligonucleotide
tgacgcgaacggacaagtttttgcgaccacgcgtttga

SEQ ID NO: 12276 - DNA, 35 bp, Artificial Sequence
  Synthetic oligonucleotide
tgccataactcgggcgtacgaaaggaaacccatcc

SEQ ID NO: 12277 - DNA, 37 bp, Artificial Sequence
  Synthetic oligonucleotide
tgctacatcctgggtcgcacacaactatcacgtagga

SEQ ID NO: 12278 - DNA, 36 bp, Artificial Sequence
  Synthetic oligonucleotide
tgtggtcgcagtttgataagcaatcccagttcgaga

SEQ ID NO: 12279 - DNA, 36 bp, Artificial Sequence
  Synthetic oligonucleotide
ttcagcccacgtttagtaagagggagatttggggga

SEQ ID NO: 12280 - DNA, 35 bp, Artificial Sequence
  Synthetic oligonucleotide
acaaccccgccaggccacactatactggctaatca

SEQ ID NO: 12281 - DNA, 36 bp, Artificial Sequence
  Synthetic oligonucleotide
acaccaccactggacgtgcacggttcacttccgaaa

SEQ ID NO: 12282 - DNA, 35 bp, Artificial Sequence
  Synthetic oligonucleotide
accacgcatcagcaatttcacaccactgcacctgc

SEQ ID NO: 12283 - DNA, 37 bp, Artificial Sequence
  Synthetic oligonucleotide
accccgcaacgcgtatgcctaactgataaagaacgga

SEQ ID NO: 12284 - DNA, 37 bp, Artificial Sequence
  Synthetic oligonucleotide
agcacatgcggtaacgttaactgtagtttttacctga

SEQ ID NO: 12285 - DNA, 37 bp, Artificial Sequence
  Synthetic oligonucleotide
agcgaaacgcgtgccaagatgctatgagcaattttga

SEQ ID NO: 12286 - DNA, 37 bp, Artificial Sequence
  Synthetic oligonucleotide
atcgacactgaccccggatacatctgcgaagaggcta

SEQ ID NO: 12287 - DNA, 36 bp, Artificial Sequence
  Synthetic oligonucleotide
atgcacctgaacacctcaccagtacgcagtcaccta

SEQ ID NO: 12288 - DNA, 35 bp, Artificial Sequence
  Synthetic oligonucleotide
atgggcccacccattccctgcggcacaaaccctac

SEQ ID NO: 12289 - DNA, 38 bp, Artificial Sequence
  Synthetic oligonucleotide
gaatgcgccaaaacggatgcgtagtaaattacgcttga

SEQ ID NO: 12290 - DNA, 37 bp, Artificial Sequence
  Synthetic oligonucleotide
gacaaacacagctgcgtattctagaactcacgacgga

SEQ ID NO: 12291 - DNA, 37 bp, Artificial Sequence
  Synthetic oligonucleotide
gacaatgtccggtcgggaacactgtatagtcatatga

SEQ ID NO: 12292 - DNA, 38 bp, Artificial Sequence
  Synthetic oligonucleotide
gacacacggacacattgtatcagagattggcacggtga

SEQ ID NO: 12293 - DNA, 36 bp, Artificial Sequence
  Synthetic oligonucleotide
gacacgggctgtacatcgaaacttaaagcatgcaaa

SEQ ID NO: 12294 - DNA, 37 bp, Artificial Sequence
  Synthetic oligonucleotide
gacactgtcaaatcaggataaagatgggtggtgtgga

SEQ ID NO: 12295 - DNA, 37 bp, Artificial Sequence
  Synthetic oligonucleotide
gaccacgcagccaggtaggtcactgacgcaatcggga

SEQ ID NO: 12296 - DNA, 37 bp, Artificial Sequence
  Synthetic oligonucleotide
gaccacgccagacgtgctagatcaccttgtcttacga

SEQ ID NO: 12297 - DNA, 35 bp, Artificial Sequence
  Synthetic oligonucleotide
gacgcaccgggcgtgggaacgatgagcgtatccta

SEQ ID NO: 12298 - DNA, 35 bp, Artificial Sequence
  Synthetic oligonucleotide
gacgccgcgcgcaagtattcgtctaaccactcatg

SEQ ID NO: 12299 - DNA, 36 bp, Artificial Sequence
  Synthetic oligonucleotide
gactcaacaccgctaagttcatcgcgagaccatgaa

SEQ ID NO: 12300 - DNA, 35 bp, Artificial Sequence
  Synthetic oligonucleotide
gatgcacgacgtgtacgccgaacgttctagctcag

SEQ ID NO: 12301 - DNA, 37 bp, Artificial Sequence
  Synthetic oligonucleotide
gatgccggggttggggttcagggaggcacccacatga

SEQ ID NO: 12302 - DNA, 35 bp, Artificial Sequence
  Synthetic oligonucleotide
gattccagcgactccctgaccccgccatgtctcgc

SEQ ID NO: 12303 - DNA, 36 bp, Artificial Sequence
  Synthetic oligonucleotide
gattgggcgccgacccacatcataatagaggactca

SEQ ID NO: 12304 - DNA, 36 bp, Artificial Sequence
  Synthetic oligonucleotide
gcaacaagcggagtgcgatgtcgaataatataggaa

SEQ ID NO: 12305 - DNA, 37 bp, Artificial Sequence
  Synthetic oligonucleotide
gcaaccgtaacagtcctgaacgaacgtgactcgcgga

SEQ ID NO: 12306 - DNA, 35 bp, Artificial Sequence
  Synthetic oligonucleotide
gcaacctgtcctgaatctgaagcatcatattccac

SEQ ID NO: 12307 - DNA, 38 bp, Artificial Sequence
  Synthetic oligonucleotide
gcacacgtacgacgacgttggaatgggtcggaccctga

SEQ ID NO: 12308 - DNA, 37 bp, Artificial Sequence
  Synthetic oligonucleotide
gcaccctgccaggacatacgttcttactgtgattcga

SEQ ID NO: 12309 - DNA, 38 bp, Artificial Sequence
  Synthetic oligonucleotide
gcatgatgcaagggttgggagttaaggtgcctatgtga

SEQ ID NO: 12310 - DNA, 36 bp, Artificial Sequence
  Synthetic oligonucleotide
gccaacgaaaccgatgctccgtcatatcactagata

SEQ ID NO: 12311 - DNA, 38 bp, Artificial Sequence
  Synthetic oligonucleotide
gcctcacgcgcaaatagcacgacgttcagtctgaatga

SEQ ID NO: 12312 - DNA, 36 bp, Artificial Sequence
  Synthetic oligonucleotide
gcgaccacagacgtcgagcgatgcaggctggtagca

SEQ ID NO: 12313 - DNA, 36 bp, Artificial Sequence
  Synthetic oligonucleotide
gctgaccgccccgaagcagatactggtctggcttca

SEQ ID NO: 12314 - DNA, 32 bp, Artificial Sequence
  Synthetic oligonucleotide
gctgacgaaccgccattcgatttagggagatt

SEQ ID NO: 12315 - DNA, 37 bp, Artificial Sequence
  Synthetic oligonucleotide
ggtgccacacgtgggttataggcatgctcccaagaga

SEQ ID NO: 12316 - DNA, 35 bp, Artificial Sequence
  Synthetic oligonucleotide
gtcaacgggcaagacattccccaaatacacgcttc

SEQ ID NO: 12317 - DNA, 37 bp, Artificial Sequence
  Synthetic oligonucleotide
gtgacagatcacacgtctaggtaaggagtcgaattga

SEQ ID NO: 12318 - DNA, 36 bp, Artificial Sequence
  Synthetic oligonucleotide
taacaccgcagtgacgacacggagcaacgttatgca

SEQ ID NO: 12319 - DNA, 38 bp, Artificial Sequence
  Synthetic oligonucleotide
tacatccgcaggttcccaccggagttgaccgatgatga

SEQ ID NO: 12320 - DNA, 35 bp, Artificial Sequence
  Synthetic oligonucleotide
tactgaccccgaaacctgccggaccccgtacactg

SEQ ID NO: 12321 - DNA, 35 bp, Artificial Sequence
  Synthetic oligonucleotide
tcaacgtgggtgcgaaaggaaatcgagaacgcgat

SEQ ID NO: 12322 - DNA, 35 bp, Artificial Sequence
  Synthetic oligonucleotide
tcacgcctccgatcgtacatttgctaggctatgag

SEQ ID NO: 12323 - DNA, 35 bp, Artificial Sequence
  Synthetic oligonucleotide
tccctgccagtcactatcgtatctatcgtttaatg

SEQ ID NO: 12324 - DNA, 37 bp, Artificial Sequence
  Synthetic oligonucleotide
tcgacgtagcgcaagagggataaatttcttgacatga

SEQ ID NO: 12325 - DNA, 38 bp, Artificial Sequence
  Synthetic oligonucleotide
tgacccgcggtgtcaattactcgaagcacatcccctga

SEQ ID NO: 12326 - DNA, 38 bp, Artificial Sequence
  Synthetic oligonucleotide
tgacgcaggtcccggctgaaactggccatacgcgctga

SEQ ID NO: 12327 - DNA, 37 bp, Artificial Sequence
  Synthetic oligonucleotide
tgacgcgcagaagtagaaagcggtcccgagcacacga

SEQ ID NO: 12328 - DNA, 35 bp, Artificial Sequence
  Synthetic oligonucleotide
tgagccagaccaggtggggtgcgctctagtcggaa

SEQ ID NO: 12329 - DNA, 35 bp, Artificial Sequence
  Synthetic oligonucleotide
tgcgaggggcgaggtacgagttgcgaatacggttg

SEQ ID NO: 12330 - DNA, 36 bp, Artificial Sequence
  Synthetic oligonucleotide
tgtcaaagctgatcttaccccgtttccggaccccga

SEQ ID NO: 12331 - DNA, 35 bp, Artificial Sequence
  Synthetic oligonucleotide
aacgaccggagtgagggctggagactaacgcgatg

SEQ ID NO: 12332 - DNA, 37 bp, Artificial Sequence
  Synthetic oligonucleotide
aacgacgaggggactgcgggtgagaatacggatggga

SEQ ID NO: 12333 - DNA, 38 bp, Artificial Sequence
  Synthetic oligonucleotide
aacgtagggccagccacaagttcacgaaagcagcttga

SEQ ID NO: 12334 - DNA, 35 bp, Artificial Sequence
  Synthetic oligonucleotide
acacccaccctcagatagctccctaaaacagcgat

SEQ ID NO: 12335 - DNA, 36 bp, Artificial Sequence
  Synthetic oligonucleotide
acaccctgcagacgtttcgtcagtggcgaatctaaa

SEQ ID NO: 12336 - DNA, 33 bp, Artificial Sequence
  Synthetic oligonucleotide
acaccgcccgccccatttagccattttacccca

SEQ ID NO: 12337 - DNA, 35 bp, Artificial Sequence
  Synthetic oligonucleotide
acacgccgagaagagtcctgagaagacattgagat

SEQ ID NO: 12338 - DNA, 35 bp, Artificial Sequence
  Synthetic oligonucleotide
accacccccatgccgtaaattagagacggccagtc

SEQ ID NO: 12339 - DNA, 38 bp, Artificial Sequence
  Synthetic oligonucleotide
accaccgcaccctcaccgttacatgacacccaccgtga

SEQ ID NO: 12340 - DNA, 35 bp, Artificial Sequence
  Synthetic oligonucleotide
accacgcgcatttgcgtaacataactaaaagttca

SEQ ID NO: 12341 - DNA, 35 bp, Artificial Sequence
  Synthetic oligonucleotide
acccaccctcgccacaaagtaaataaatcccacgt

SEQ ID NO: 12342 - DNA, 36 bp, Artificial Sequence
  Synthetic oligonucleotide
acccacgctcacagccaagacacttatggtaacgga

SEQ ID NO: 12343 - DNA, 37 bp, Artificial Sequence
  Synthetic oligonucleotide
accgcaacacccgctcgtctgagaaagtcaatgggga

SEQ ID NO: 12344 - DNA, 35 bp, Artificial Sequence
  Synthetic oligonucleotide
actgacgcattgccctcactaacacaggttcgcac

SEQ ID NO: 12345 - DNA, 35 bp, Artificial Sequence
  Synthetic oligonucleotide
actgcgaggacatcaccgtaacgcatccaaggggc

SEQ ID NO: 12346 - DNA, 36 bp, Artificial Sequence
  Synthetic oligonucleotide
agcgacgccgcaacagttgggtaccagtgttatcga

SEQ ID NO: 12347 - DNA, 37 bp, Artificial Sequence
  Synthetic oligonucleotide
aggtccgtgcgcatctccacagtttcgaccccgccga

SEQ ID NO: 12348 - DNA, 37 bp, Artificial Sequence
  Synthetic oligonucleotide
atcgacgggttgcactgatgactgagtcagtacacga

SEQ ID NO: 12349 - DNA, 38 bp, Artificial Sequence
  Synthetic oligonucleotide
atgctcggcctcaactgcgtctaacacccatactttga

SEQ ID NO: 12350 - DNA, 37 bp, Artificial Sequence
  Synthetic oligonucleotide
attgcacccccctcgtacgtaaccggtatgtcacgga

SEQ ID NO: 12351 - DNA, 37 bp, Artificial Sequence
  Synthetic oligonucleotide
cggcccagcaccaaatgctatcaatgttccccacgga

SEQ ID NO: 12352 - DNA, 38 bp, Artificial Sequence
  Synthetic oligonucleotide
gaccgcatgcaagctgttcttcagtacggtcacagtga

SEQ ID NO: 12353 - DNA, 37 bp, Artificial Sequence
  Synthetic oligonucleotide
gacgacctgacgtgctaaaaacgcttctatcacccga

SEQ ID NO: 12354 - DNA, 35 bp, Artificial Sequence
  Synthetic oligonucleotide
gacgccattagcaactctctagactcagattgggt

SEQ ID NO: 12355 - DNA, 35 bp, Artificial Sequence
  Synthetic oligonucleotide
gacgccccatgtgatagcgtcctctcgccgcacac

SEQ ID NO: 12356 - DNA, 36 bp, Artificial Sequence
  Synthetic oligonucleotide
gacgccgagctttcagacgaggagtaaccgaccgta

SEQ ID NO: 12357 - DNA, 35 bp, Artificial Sequence
  Synthetic oligonucleotide
gactgacgcccggaaacgttggaagcctgctcttg

SEQ ID NO: 12358 - DNA, 37 bp, Artificial Sequence
  Synthetic oligonucleotide
gagcacgcccgcccctcgaaactgagtcctgtcgaga

SEQ ID NO: 12359 - DNA, 36 bp, Artificial Sequence
  Synthetic oligonucleotide
gatgccccgtgaggctggttccagtcgccacataca

SEQ ID NO: 12360 - DNA, 38 bp, Artificial Sequence
  Synthetic oligonucleotide
gcaccataccgaatcatcggagactgcgtacaccctga

SEQ ID NO: 12361 - DNA, 35 bp, Artificial Sequence
  Synthetic oligonucleotide
gcagggcggaaaaacgggaggctcactcgtgtggg

SEQ ID NO: 12362 - DNA, 38 bp, Artificial Sequence
  Synthetic oligonucleotide
gcataggtgggtgaagtgggaacgtggttagctgatga

SEQ ID NO: 12363 - DNA, 37 bp, Artificial Sequence
  Synthetic oligonucleotide
gccaatcaggtggtcaccgagtaatatcaaggcacga

SEQ ID NO: 12364 - DNA, 35 bp, Artificial Sequence
  Synthetic oligonucleotide
gccacagtgacataacagtcttaaacgtcggaact

SEQ ID NO: 12365 - DNA, 35 bp, Artificial Sequence
  Synthetic oligonucleotide
gccacgaggggcgtacgagcgacatcctttccaca

SEQ ID NO: 12366 - DNA, 37 bp, Artificial Sequence
  Synthetic oligonucleotide
gccgaacaggccacccgaacgccgataaggtaacgga

SEQ ID NO: 12367 - DNA, 37 bp, Artificial Sequence
  Synthetic oligonucleotide
gcgaaagcgcgactgcactacatgtccaatacaccga

SEQ ID NO: 12368 - DNA, 36 bp, Artificial Sequence
  Synthetic oligonucleotide
gcgcaacggacggatagctgctacgacaccacacca

SEQ ID NO: 12369 - DNA, 37 bp, Artificial Sequence
  Synthetic oligonucleotide
gctgcaaaccgacgagtagttatacttctaaaaacga

SEQ ID NO: 12370 - DNA, 38 bp, Artificial Sequence
  Synthetic oligonucleotide
ggagacggagacgggggtatcgtgagaagggttgctga

SEQ ID NO: 12371 - DNA, 35 bp, Artificial Sequence
  Synthetic oligonucleotide
ggtcgacacgcattgctatttattaacgccttact

SEQ ID NO: 12372 - DNA, 38 bp, Artificial Sequence
  Synthetic oligonucleotide
ggtgggagccggtgtggtattgcggacggccacaatga

SEQ ID NO: 12373 - DNA, 35 bp, Artificial Sequence
  Synthetic oligonucleotide
gtcaacgacgaggaggacgcagaagatcgctcgat

SEQ ID NO: 12374 - DNA, 38 bp, Artificial Sequence
  Synthetic oligonucleotide
gtgacgccgaaaggatggatcgaaacgactgtctttga

SEQ ID NO: 12375 - DNA, 36 bp, Artificial Sequence
  Synthetic oligonucleotide
gtgcgaggacgtacgcacatgagtcgaaacaaggaa

SEQ ID NO: 12376 - DNA, 37 bp, Artificial Sequence
  Synthetic oligonucleotide
tacacgcgatccggatacgaagcctaatctatccaga

SEQ ID NO: 12377 - DNA, 35 bp, Artificial Sequence
  Synthetic oligonucleotide
tacggactgcagatcgcctcattcccagcaactgc

SEQ ID NO: 12378 - DNA, 37 bp, Artificial Sequence
  Synthetic oligonucleotide
tagtcggggaacacgcagatcttactgaccccggaga

SEQ ID NO: 12379 - DNA, 35 bp, Artificial Sequence
  Synthetic oligonucleotide
tcaaccacacgggcaataccgactgtcttttcacg

SEQ ID NO: 12380 - DNA, 35 bp, Artificial Sequence
  Synthetic oligonucleotide
tcactggccccaccgacgtaatcaacctgcaatgc

SEQ ID NO: 12381 - DNA, 35 bp, Artificial Sequence
  Synthetic oligonucleotide
tccacgcgcaatcccgcacgagagacgtattcgga

SEQ ID NO: 12382 - DNA, 36 bp, Artificial Sequence
  Synthetic oligonucleotide
tgcgacatcccaatgtcgacaacctacgtaggcgta

SEQ ID NO: 12383 - DNA, 38 bp, Artificial Sequence
  Synthetic oligonucleotide
ttgacaagctgccactactactttttcctaccacttga

SEQ ID NO: 12384 - DNA, 35 bp, Artificial Sequence
  Synthetic oligonucleotide
aaacgcgctgactgcctacgttacccacttatata

SEQ ID NO: 12385 - DNA, 36 bp, Artificial Sequence
  Synthetic oligonucleotide
aacacacatcgcggaagttgagcgagaggttcagaa

SEQ ID NO: 12386 - DNA, 38 bp, Artificial Sequence
  Synthetic oligonucleotide
aacacccgcagatgggaagcggggcgagtaagggctga

SEQ ID NO: 12387 - DNA, 35 bp, Artificial Sequence
  Synthetic oligonucleotide
aacacgatcggaacgttgactctcgtcaggacgac

SEQ ID NO: 12388 - DNA, 35 bp, Artificial Sequence
  Synthetic oligonucleotide
aaccccggtcagtgtggggccatgcatgcctaaaa

SEQ ID NO: 12389 - DNA, 37 bp, Artificial Sequence
  Synthetic oligonucleotide
aacgcgggcaacgattgcgtcatatccaccgccacga

SEQ ID NO: 12390 - DNA, 37 bp, Artificial Sequence
  Synthetic oligonucleotide
aactgcaccacatagccgtatcgcgaactctgcaaga

SEQ ID NO: 12391 - DNA, 37 bp, Artificial Sequence
  Synthetic oligonucleotide
aagccacacgcagtcacatgtgacataatttacgaga

SEQ ID NO: 12392 - DNA, 36 bp, Artificial Sequence
  Synthetic oligonucleotide
acacaaaccatagtcggcaaagagagcacgatggga

SEQ ID NO: 12393 - DNA, 38 bp, Artificial Sequence
  Synthetic oligonucleotide
accagagcaccagagtagctgagggacttacacgttga

SEQ ID NO: 12394 - DNA, 37 bp, Artificial Sequence
  Synthetic oligonucleotide
accgctggcaacgataggtttcgctgtacgtcagaga

SEQ ID NO: 12395 - DNA, 35 bp, Artificial Sequence
  Synthetic oligonucleotide
actcgcgaccgcacctatcatcgtaaacactcgaa

SEQ ID NO: 12396 - DNA, 38 bp, Artificial Sequence
  Synthetic oligonucleotide
actctcgccacccaattagtccgctgtcatcccaatga

SEQ ID NO: 12397 - DNA, 37 bp, Artificial Sequence
  Synthetic oligonucleotide
actgatcgacacagataacgatactcaggagatagga

SEQ ID NO: 12398 - DNA, 37 bp, Artificial Sequence
  Synthetic oligonucleotide
atgacccgccgtaagggctcatgccaatctgtccgga

SEQ ID NO: 12399 - DNA, 35 bp, Artificial Sequence
  Synthetic oligonucleotide
atgtgcgcgggcccccttcctatccacaccacttt

SEQ ID NO: 12400 - DNA, 35 bp, Artificial Sequence
  Synthetic oligonucleotide
gacagagtcacggtggtaagtaggaggggacaagg

SEQ ID NO: 12401 - DNA, 36 bp, Artificial Sequence
  Synthetic oligonucleotide
gacccgcggggaatgtttagcattcgcagacgctaa

SEQ ID NO: 12402 - DNA, 37 bp, Artificial Sequence
  Synthetic oligonucleotide
gacgaggtggtagactgcaaacaggttggtccgagga

SEQ ID NO: 12403 - DNA, 35 bp, Artificial Sequence
  Synthetic oligonucleotide
gacgcacacagtcgtactctgcttagaccctacaa

SEQ ID NO: 12404 - DNA, 36 bp, Artificial Sequence
  Synthetic oligonucleotide
gacgcacgtatcgctcgtgttccctactcttcttta

SEQ ID NO: 12405 - DNA, 37 bp, Artificial Sequence
  Synthetic oligonucleotide
gacgcagggcgagcgataacaaacaccggggtattga

SEQ ID NO: 12406 - DNA, 38 bp, Artificial Sequence
  Synthetic oligonucleotide
gacgcgaatacgagctcatctcgttaggcagaacgtga

SEQ ID NO: 12407 - DNA, 37 bp, Artificial Sequence
  Synthetic oligonucleotide
gagctgccgcccggggtaccgacaagaaaggcgagga

SEQ ID NO: 12408 - DNA, 37 bp, Artificial Sequence
  Synthetic oligonucleotide
gatacgcccacggcccggtatcagatgtctgcggaga

SEQ ID NO: 12409 - DNA, 35 bp, Artificial Sequence
  Synthetic oligonucleotide
gcaacacagtagcggatgactactgacttgttcgt

SEQ ID NO: 12410 - DNA, 37 bp, Artificial Sequence
  Synthetic oligonucleotide
gcaaccaaagtatgtaccggattgctactttgtaaga

SEQ ID NO: 12411 - DNA, 38 bp, Artificial Sequence
  Synthetic oligonucleotide
gcacaccgccttctccattataaccgatcagtctctga

SEQ ID NO: 12412 - DNA, 35 bp, Artificial Sequence
  Synthetic oligonucleotide
gcacacgccgtcggtgtgcaccgggtcacccctaa

SEQ ID NO: 12413 - DNA, 35 bp, Artificial Sequence
  Synthetic oligonucleotide
gcacacgtggggccacgatgcgcaacaggaggttc

SEQ ID NO: 12414 - DNA, 36 bp, Artificial Sequence
  Synthetic oligonucleotide
gcaccaacaaacacgtgcacggtagacagatcatta

SEQ ID NO: 12415 - DNA, 38 bp, Artificial Sequence
  Synthetic oligonucleotide
gccccagccataacattatgagagagagtagaagctga

SEQ ID NO: 12416 - DNA, 36 bp, Artificial Sequence
  Synthetic oligonucleotide
gccgagctcacgatcaccaacactcaccatcgatta

SEQ ID NO: 12417 - DNA, 37 bp, Artificial Sequence
  Synthetic oligonucleotide
gcctaccccacatagacagagcatgtcactagcctga

SEQ ID NO: 12418 - DNA, 37 bp, Artificial Sequence
  Synthetic oligonucleotide
gcctgacgcaatcagccttatctagtccataccagga

SEQ ID NO: 12419 - DNA, 36 bp, Artificial Sequence
  Synthetic oligonucleotide
gctacatccacatcgccttcatgagatactcaaaca

SEQ ID NO: 12420 - DNA, 35 bp, Artificial Sequence
  Synthetic oligonucleotide
gctgccgagagggagtctagtgacttgccgatgcg

SEQ ID NO: 12421 - DNA, 37 bp, Artificial Sequence
  Synthetic oligonucleotide
gctggactgcctgacggatggacaaacgttgggacga

SEQ ID NO: 12422 - DNA, 36 bp, Artificial Sequence
  Synthetic oligonucleotide
gtgacgcagtaagttataacctcgcccatttcccaa

SEQ ID NO: 12423 - DNA, 35 bp, Artificial Sequence
  Synthetic oligonucleotide
gtgcacagcctgtactctgtagcacccgaccgtat

SEQ ID NO: 12424 - DNA, 37 bp, Artificial Sequence
  Synthetic oligonucleotide
gtgcacccacggacgcttgataaatatcagtttccga

SEQ ID NO: 12425 - DNA, 36 bp, Artificial Sequence
  Synthetic oligonucleotide
tacaccctgcccactgaccccgaccacttgttgcat

SEQ ID NO: 12426 - DNA, 37 bp, Artificial Sequence
  Synthetic oligonucleotide
tacgccgcctggagagacgagaaataagctgatggga

SEQ ID NO: 12427 - DNA, 38 bp, Artificial Sequence
  Synthetic oligonucleotide
tacgcgatcgtggcgtttcggatgtcaggcggaaatga

SEQ ID NO: 12428 - DNA, 36 bp, Artificial Sequence
  Synthetic oligonucleotide
tcacacgcgaagttcgtattgagcaattagaaataa

SEQ ID NO: 12429 - DNA, 38 bp, Artificial Sequence
  Synthetic oligonucleotide
tcacgctggatgtaggatgagcgtgctagcagacttga

SEQ ID NO: 12430 - DNA, 37 bp, Artificial Sequence
  Synthetic oligonucleotide
tcagcaacccgagtaccatgtaacgaacgtcgcaaga

SEQ ID NO: 12431 - DNA, 35 bp, Artificial Sequence
  Synthetic oligonucleotide
tcgagacacgagcgagatatgtaaattgggtcgtg

SEQ ID NO: 12432 - DNA, 35 bp, Artificial Sequence
  Synthetic oligonucleotide
tgaccaaccagtcagtctagtcagtccgacttcgc

SEQ ID NO: 12433 - DNA, 35 bp, Artificial Sequence
  Synthetic oligonucleotide
tgacgagcacgatagctacttatgcgttggtacgc

SEQ ID NO: 12434 - DNA, 36 bp, Artificial Sequence
  Synthetic oligonucleotide
tgacggggggtcaacgtaagcaggaacctgttacca

SEQ ID NO: 12435 - DNA, 35 bp, Artificial Sequence
  Synthetic oligonucleotide
tgagccacccccgataggtacttgcaggcaccttg

SEQ ID NO: 12436 - DNA, 35 bp, Artificial Sequence
  Synthetic oligonucleotide
tgccacgcatacgtacactcaatgacaggaagaat

SEQ ID NO: 12437 - DNA, 38 bp, Artificial Sequence
  Synthetic oligonucleotide
tgcgagccggtagtaggtgtgataagctaacgtgctga

SEQ ID NO: 12438 - DNA, 37 bp, Artificial Sequence
  Synthetic oligonucleotide
aacgaccgggaagacggatgtgggtgggtaggtgaga

SEQ ID NO: 12439 - DNA, 37 bp, Artificial Sequence
  Synthetic oligonucleotide
aacgtcaaggcgcatcggatctacgacaacactaaga

SEQ ID NO: 12440 - DNA, 35 bp, Artificial Sequence
  Synthetic oligonucleotide
aagcgcacatgcccaagaaaacgagcgtgggcgat

SEQ ID NO: 12441 - DNA, 35 bp, Artificial Sequence
  Synthetic oligonucleotide
acaatccagtagagcgggccttacgattttcccgc

SEQ ID NO: 12442 - DNA, 35 bp, Artificial Sequence
  Synthetic oligonucleotide
acacaccccaaggtatcgagggtcatcggccatga

SEQ ID NO: 12443 - DNA, 37 bp, Artificial Sequence
  Synthetic oligonucleotide
accacaaacgtcatgaggcaggcaatacagctaacca

SEQ ID NO: 12444 - DNA, 35 bp, Artificial Sequence
  Synthetic oligonucleotide
acccacggggccactccgaattaatccggatgcgc

SEQ ID NO: 12445 - DNA, 36 bp, Artificial Sequence
  Synthetic oligonucleotide
accctcaacagcagccgtgtaaacacacctgaggca

SEQ ID NO: 12446 - DNA, 36 bp, Artificial Sequence
  Synthetic oligonucleotide
accggacgtgcgctacgcagggatgatgccttaata

SEQ ID NO: 12447 - DNA, 35 bp, Artificial Sequence
  Synthetic oligonucleotide
actgccgtggcgggaacacgtcatcccacttttca

SEQ ID NO: 12448 - DNA, 36 bp, Artificial Sequence
  Synthetic oligonucleotide
agacccccacacgcgtagccccagatagtcgttaga

SEQ ID NO: 12449 - DNA, 37 bp, Artificial Sequence
  Synthetic oligonucleotide
agcggggagctatcggtcgaggcacattgatggtgga

SEQ ID NO: 12450 - DNA, 38 bp, Artificial Sequence
  Synthetic oligonucleotide
agtgccaccctcacataggggagccggagaactactga

SEQ ID NO: 12451 - DNA, 38 bp, Artificial Sequence
  Synthetic oligonucleotide
atgcaccagacgtgtggaggacgacgatagtctgatga

SEQ ID NO: 12452 - DNA, 36 bp, Artificial Sequence
  Synthetic oligonucleotide
gacaacgatcaggtgtcatctccacgacgtgacgta

SEQ ID NO: 12453 - DNA, 38 bp, Artificial Sequence
  Synthetic oligonucleotide
gacacgccggttgtttacgttcgattgttccccaaaga

SEQ ID NO: 12454 - DNA, 35 bp, Artificial Sequence
  Synthetic oligonucleotide
gaccacccctcgaaatgacgtaggaggcccactcc

SEQ ID NO: 12455 - DNA, 36 bp, Artificial Sequence
  Synthetic oligonucleotide
gaccaccgcagttctgggttactgctcagtgcttca

SEQ ID NO: 12456 - DNA, 38 bp, Artificial Sequence
  Synthetic oligonucleotide
gacgagaaggctgctgacacgtgacagcaaggcgctga

SEQ ID NO: 12457 - DNA, 35 bp, Artificial Sequence
  Synthetic oligonucleotide
gacgcgaaaggccagggttaccatgcgcctcaata

SEQ ID NO: 12458 - DNA, 37 bp, Artificial Sequence
  Synthetic oligonucleotide
gacggggagaccggtatcattgcccacgcggtcacga

SEQ ID NO: 12459 - DNA, 36 bp, Artificial Sequence
  Synthetic oligonucleotide
gactcccgcaccctcaatctttgcctaccaggccca

SEQ ID NO: 12460 - DNA, 35 bp, Artificial Sequence
  Synthetic oligonucleotide
gactcgcggagactgtcttcgtacggtttggggcg

SEQ ID NO: 12461 - DNA, 36 bp, Artificial Sequence
  Synthetic oligonucleotide
gagcggggagtggatataagcaggaagaacgttcta

SEQ ID NO: 12462 - DNA, 35 bp, Artificial Sequence
  Synthetic oligonucleotide
gagtcggaatcagacgtattacaccgacctccaca

SEQ ID NO: 12463 - DNA, 36 bp, Artificial Sequence
  Synthetic oligonucleotide
gatgcgcccaggaacatcgcgaggtaagccatggca

SEQ ID NO: 12464 - DNA, 36 bp, Artificial Sequence
  Synthetic oligonucleotide
gatgcgctaacttgacaaaaagtccccgtggcaata

SEQ ID NO: 12465 - DNA, 36 bp, Artificial Sequence
  Synthetic oligonucleotide
gcacacgcacgttccccctaccagttttctcaaaaa

SEQ ID NO: 12466 - DNA, 37 bp, Artificial Sequence
  Synthetic oligonucleotide
gcacgctaagcgactaaggatagtgaatgacttgcga

SEQ ID NO: 12467 - DNA, 36 bp, Artificial Sequence
  Synthetic oligonucleotide
gccaaccagccagaatgttgagttagtgttcatgca

SEQ ID NO: 12468 - DNA, 35 bp, Artificial Sequence
  Synthetic oligonucleotide
gcccaagggtgggagcacgattgcatgaaagcctc

SEQ ID NO: 12469 - DNA, 38 bp, Artificial Sequence
  Synthetic oligonucleotide
gctgaccacagaatgttagtgaaatggttttgacatga

SEQ ID NO: 12470 - DNA, 35 bp, Artificial Sequence
  Synthetic oligonucleotide
gctgactagcacccgattattgaacgtaactatgt

SEQ ID NO: 12471 - DNA, 36 bp, Artificial Sequence
  Synthetic oligonucleotide
gctgagctggtgccggattcaggatgacatgctcta

SEQ ID NO: 12472 - DNA, 35 bp, Artificial Sequence
  Synthetic oligonucleotide
gctggacaatgcctccatcgcgataacagtccgtt

SEQ ID NO: 12473 - DNA, 38 bp, Artificial Sequence
  Synthetic oligonucleotide
ggacccgccctccgcaatagcgatggtccacggactga

SEQ ID NO: 12474 - DNA, 36 bp, Artificial Sequence
  Synthetic oligonucleotide
gtccggacaacgcgtagggtgtaggtcgactgacca

SEQ ID NO: 12475 - DNA, 36 bp, Artificial Sequence
  Synthetic oligonucleotide
gtcgcaaggcacggaagggtaagagaatgatcgata

SEQ ID NO: 12476 - DNA, 36 bp, Artificial Sequence
  Synthetic oligonucleotide
tacatacgtccacgactgtgagcgatacactcacga

SEQ ID NO: 12477 - DNA, 35 bp, Artificial Sequence
  Synthetic oligonucleotide
taccgaacacgcttcacctgaccccgtctctgagc

SEQ ID NO: 12478 - DNA, 37 bp, Artificial Sequence
  Synthetic oligonucleotide
tagtgctgcacggcgttcatgcctcctaacccacgga

SEQ ID NO: 12479 - DNA, 38 bp, Artificial Sequence
  Synthetic oligonucleotide
tatgcccaccatctgggactaagcgaagggtcccatga

SEQ ID NO: 12480 - DNA, 37 bp, Artificial Sequence
  Synthetic oligonucleotide
tatgccgcccgcgcgccatacggagcctcatgcatga

SEQ ID NO: 12481 - DNA, 35 bp, Artificial Sequence
  Synthetic oligonucleotide
tccaacggggctcagaaggcagagctcctggtagt

SEQ ID NO: 12482 - DNA, 36 bp, Artificial Sequence
  Synthetic oligonucleotide
tccgacacacgtagctgtccacactcacatgctgca

SEQ ID NO: 12483 - DNA, 36 bp, Artificial Sequence
  Synthetic oligonucleotide
tccgccaccgagcaaggggagatatggccccttgga

SEQ ID NO: 12484 - DNA, 36 bp, Artificial Sequence
  Synthetic oligonucleotide
tgaccactgcatatgcgcccacgaatagaggctgca

SEQ ID NO: 12485 - DNA, 35 bp, Artificial Sequence
  Synthetic oligonucleotide
tgacgtcaaacagtaccaaatagaaaacccgtcgc

SEQ ID NO: 12486 - DNA, 37 bp, Artificial Sequence
  Synthetic oligonucleotide
tgacgtggtgaggttcgatggttcagtatttgttcga

SEQ ID NO: 12487 - DNA, 35 bp, Artificial Sequence
  Synthetic oligonucleotide
tgatgcaaggagtaagaatcggttcagcccccgcc

SEQ ID NO: 12488 - DNA, 37 bp, Artificial Sequence
  Synthetic oligonucleotide
tgtcaaccactaaacatcgccctacgtgacgggggga

SEQ ID NO: 12489 - DNA, 37 bp, Artificial Sequence
  Synthetic oligonucleotide
ttaaccgcacactgtgccatcggaacagcaatgagga

SEQ ID NO: 12490 - DNA, 37 bp, Artificial Sequence
  Synthetic oligonucleotide
aaacgcaaagccatccgacaaccacgaaacctcctga

SEQ ID NO: 12491 - DNA, 36 bp, Artificial Sequence
  Synthetic oligonucleotide
aacaccacacagcaacaatacagtgactcgcgatga

SEQ ID NO: 12492 - DNA, 35 bp, Artificial Sequence
  Synthetic oligonucleotide
aacacgcacggttattacatgacagtctggatggt

SEQ ID NO: 12493 - DNA, 35 bp, Artificial Sequence
  Synthetic oligonucleotide
aagtcaactgcaggaatcaaacctctggggcatag

SEQ ID NO: 12494 - DNA, 37 bp, Artificial Sequence
  Synthetic oligonucleotide
acacaacgcgccaggtgcttgtagaatacgtcaccga

SEQ ID NO: 12495 - DNA, 36 bp, Artificial Sequence
  Synthetic oligonucleotide
acacgaaacggctacgtacactaatgctcagcttta

SEQ ID NO: 12496 - DNA, 37 bp, Artificial Sequence
  Synthetic oligonucleotide
acccggaccgccccatcctacatcctgtccacatgga

SEQ ID NO: 12497 - DNA, 38 bp, Artificial Sequence
  Synthetic oligonucleotide
acctgccgacaggactactcaaacacatgtatctctga

SEQ ID NO: 12498 - DNA, 36 bp, Artificial Sequence
  Synthetic oligonucleotide
acgccggtacggtgcggacaaagtatgtgcccatca

SEQ ID NO: 12499 - DNA, 37 bp, Artificial Sequence
  Synthetic oligonucleotide
agccacggcaagaactaaccatcaacatccacgagga

SEQ ID NO: 12500 - DNA, 36 bp, Artificial Sequence
  Synthetic oligonucleotide
atgccaccgcactgtgtccttctcaaatttcgtaca

SEQ ID NO: 12501 - DNA, 37 bp, Artificial Sequence
  Synthetic oligonucleotide
cctgagcgagatcgcctcatgagcactactgacggga

SEQ ID NO: 12502 - DNA, 37 bp, Artificial Sequence
  Synthetic oligonucleotide
gaagccccggaatgcatagaaaggcaacctatgtgga

SEQ ID NO: 12503 - DNA, 38 bp, Artificial Sequence
  Synthetic oligonucleotide
gaagcgggcactatagatgaccataaacgcatatctga

SEQ ID NO: 12504 - DNA, 38 bp, Artificial Sequence
  Synthetic oligonucleotide
gaagtgcgccaatggagtgctcgattagcctgaactga

SEQ ID NO: 12505 - DNA, 35 bp, Artificial Sequence
  Synthetic oligonucleotide
gacaagccggataaagcataatctacacgtcacag

SEQ ID NO: 12506 - DNA, 36 bp, Artificial Sequence
  Synthetic oligonucleotide
gacacatgcagtcacagtgttcgacggggaaacgca

SEQ ID NO: 12507 - DNA, 35 bp, Artificial Sequence
  Synthetic oligonucleotide
gacaccacaggttagaaggacagcaacgtagagat

SEQ ID NO: 12508 - DNA, 36 bp, Artificial Sequence
  Synthetic oligonucleotide
gacccacccacggagtcaggaccttagccaccaaaa

SEQ ID NO: 12509 - DNA, 37 bp, Artificial Sequence
  Synthetic oligonucleotide
gaccgagccacattacaggcttgagacaaagtgttga

SEQ ID NO: 12510 - DNA, 38 bp, Artificial Sequence
  Synthetic oligonucleotide
gacgccacaggatgaggtaggaggacgtcgtgccttga

SEQ ID NO: 12511 - DNA, 36 bp, Artificial Sequence
  Synthetic oligonucleotide
gactgggccagaatggtgctaaagtcgtttcatgaa

SEQ ID NO: 12512 - DNA, 35 bp, Artificial Sequence
  Synthetic oligonucleotide
gatgctgccaaaccgtctttgatccaagggctcgc

SEQ ID NO: 12513 - DNA, 38 bp, Artificial Sequence
  Synthetic oligonucleotide
gatgtgccaagcttcggtgaagaaggacgaatgactga

SEQ ID NO: 12514 - DNA, 36 bp, Artificial Sequence
  Synthetic oligonucleotide
gcacatcggtccgattgcacgataaagtatctatga

SEQ ID NO: 12515 - DNA, 35 bp, Artificial Sequence
  Synthetic oligonucleotide
gcaccgcgaggtatcaaaaagggaaggtgcacgta

SEQ ID NO: 12516 - DNA, 38 bp, Artificial Sequence
  Synthetic oligonucleotide
gcaggccaaacgcatgctattcacggtcgtacatatga

SEQ ID NO: 12517 - DNA, 37 bp, Artificial Sequence
  Synthetic oligonucleotide
gcatacgttccgcaatcgaacagttcctagaccccga

SEQ ID NO: 12518 - DNA, 37 bp, Artificial Sequence
  Synthetic oligonucleotide
gccaatgtcgcggccagtagtaccgaagcaacgtaga

SEQ ID NO: 12519 - DNA, 37 bp, Artificial Sequence
  Synthetic oligonucleotide
gccacaaccgggagacttgtcgaaaaaagggcgacga

SEQ ID NO: 12520 - DNA, 37 bp, Artificial Sequence
  Synthetic oligonucleotide
gccagaaccggccacggtcgtagagcctgggggttga

SEQ ID NO: 12521 - DNA, 38 bp, Artificial Sequence
  Synthetic oligonucleotide
gccgaccggtcaaggaggcacggacacatccgtcgtga

SEQ ID NO: 12522 - DNA, 38 bp, Artificial Sequence
  Synthetic oligonucleotide
gccgggctagtcggcacatcgctactcaagaaccatga

SEQ ID NO: 12523 - DNA, 36 bp, Artificial Sequence
  Synthetic oligonucleotide
gccggtcgcaggagatgacaacagcacagtggacga

SEQ ID NO: 12524 - DNA, 36 bp, Artificial Sequence
  Synthetic oligonucleotide
gctgtgccagtcccagacaataggaggcgggtgtta

SEQ ID NO: 12525 - DNA, 35 bp, Artificial Sequence
  Synthetic oligonucleotide
gtcgaacagtggcaaagtgtatcgccaacgacaga

SEQ ID NO: 12526 - DNA, 37 bp, Artificial Sequence
  Synthetic oligonucleotide
gtgagccacaccgccgtggtggatgaccgtaatgaga

SEQ ID NO: 12527 - DNA, 35 bp, Artificial Sequence
  Synthetic oligonucleotide
gttcacgccgcgcggtgatgtggtatggagggttg

SEQ ID NO: 12528 - DNA, 38 bp, Artificial Sequence
  Synthetic oligonucleotide
taccgcacacgaactgttaccagagaccatgtgtctga

SEQ ID NO: 12529 - DNA, 36 bp, Artificial Sequence
  Synthetic oligonucleotide
tagccaagcggagtgatactcagtgggatagtgtga

SEQ ID NO: 12530 - DNA, 35 bp, Artificial Sequence
  Synthetic oligonucleotide
tagccacgcaaggggcgtatcccgatacgtctcac

SEQ ID NO: 12531 - DNA, 37 bp, Artificial Sequence
  Synthetic oligonucleotide
tagccagaggcgattacggacaacaaacactatatga

SEQ ID NO: 12532 - DNA, 36 bp, Artificial Sequence
  Synthetic oligonucleotide
tagtggcgcagccagggtcgccattgcgtagtcaaa

SEQ ID NO: 12533 - DNA, 36 bp, Artificial Sequence
  Synthetic oligonucleotide
tcacatgctctggtcatacggtcccctgatccttca

SEQ ID NO: 12534 - DNA, 35 bp, Artificial Sequence
  Synthetic oligonucleotide
tccgacgtacggcgcaggtccttatgttgagttct

SEQ ID NO: 12535 - DNA, 36 bp, Artificial Sequence
  Synthetic oligonucleotide
tgacccgccagcagccaatatcgctagccgtatata

SEQ ID NO: 12536 - DNA, 35 bp, Artificial Sequence
  Synthetic oligonucleotide
tgagcatgtcggcccaaagtaatcatatcccacac

SEQ ID NO: 12537 - DNA, 38 bp, Artificial Sequence
  Synthetic oligonucleotide
tgtcaagccgtagacgcgttaagagaaaaccgacatga

SEQ ID NO: 12538 - DNA, 36 bp, Artificial Sequence
  Synthetic oligonucleotide
ttgacagtcgccgcggtagtccagaaagctaattcg

SEQ ID NO: 12539 - DNA, 35 bp, Artificial Sequence
  Synthetic oligonucleotide
ttgccgccgcgcaacttaccgggcagtttgcaccc

SEQ ID NO: 12540 - DNA, 37 bp, Artificial Sequence
  Synthetic oligonucleotide
aacaacacatcagacggtaaagatgtcggatcgatga

SEQ ID NO: 12541 - DNA, 37 bp, Artificial Sequence
  Synthetic oligonucleotide
aacaccgaccgtcaacgtattgcagggggagacgtga

SEQ ID NO: 12542 - DNA, 37 bp, Artificial Sequence
  Synthetic oligonucleotide
aacaccgccgattcgaacgacccgctgcatactcgga

SEQ ID NO: 12543 - DNA, 36 bp, Artificial Sequence
  Synthetic oligonucleotide
aacatcgggagcagtgcaatcttgatctcgccttaa

SEQ ID NO: 12544 - DNA, 36 bp, Artificial Sequence
  Synthetic oligonucleotide
aacctgcgggcctgtcgtgtcggaccagactcggta

SEQ ID NO: 12545 - DNA, 36 bp, Artificial Sequence
  Synthetic oligonucleotide
acaacggtcacgtggttgtaccaagggtgcctgtta

SEQ ID NO: 12546 - DNA, 35 bp, Artificial Sequence
  Synthetic oligonucleotide
acacaccgtgatatgcggtgacaagacaaacgata

SEQ ID NO: 12547 - DNA, 35 bp, Artificial Sequence
  Synthetic oligonucleotide
acacacgaccctacagactattaatcccgaggtta

SEQ ID NO: 12548 - DNA, 37 bp, Artificial Sequence
  Synthetic oligonucleotide
acagagggcgacggaagttaattacgggaaggaaaga

SEQ ID NO: 12549 - DNA, 37 bp, Artificial Sequence
  Synthetic oligonucleotide
acatccacaaagccatcgactcggttgggaccggaga

SEQ ID NO: 12550 - DNA, 36 bp, Artificial Sequence
  Synthetic oligonucleotide
accacgaacttgaggtcgaagtacagcaccatgtga

SEQ ID NO: 12551 - DNA, 36 bp, Artificial Sequence
  Synthetic oligonucleotide
acccagacccgtccaccgcaggctcatcgactctca

SEQ ID NO: 12552 - DNA, 37 bp, Artificial Sequence
  Synthetic oligonucleotide
accgaaccgactggtgaaaagtataaattggaccaga

SEQ ID NO: 12553 - DNA, 36 bp, Artificial Sequence
  Synthetic oligonucleotide
accggtcagggacgtactggcgagtgataaacccaa

SEQ ID NO: 12554 - DNA, 35 bp, Artificial Sequence
  Synthetic oligonucleotide
agacgccatgacccacccacctggtttcacactga

SEQ ID NO: 12555 - DNA, 35 bp, Artificial Sequence
  Synthetic oligonucleotide
agtacccaccgccatcagccgagacgaccttaacc

SEQ ID NO: 12556 - DNA, 36 bp, Artificial Sequence
  Synthetic oligonucleotide
atcgatagccagaataaaggttcatgctcattgcaa

SEQ ID NO: 12557 - DNA, 35 bp, Artificial Sequence
  Synthetic oligonucleotide
attcccggcgaaaatgcgcccatatacgccgtgtg

SEQ ID NO: 12558 - DNA, 36 bp, Artificial Sequence
  Synthetic oligonucleotide
attgccgcagacaggatggcacgtagacttcggaca

SEQ ID NO: 12559 - DNA, 35 bp, Artificial Sequence
  Synthetic oligonucleotide
gaacacgtaacgtagggggactgcgccgttcgatc

SEQ ID NO: 12560 - DNA, 37 bp, Artificial Sequence
  Synthetic oligonucleotide
gaacccccatgcggtctgaggctagcgcatttgagga

SEQ ID NO: 12561 - DNA, 38 bp, Artificial Sequence
  Synthetic oligonucleotide
gaaccgcatagtaggttaaggcgactgcatctcgttga

SEQ ID NO: 12562 - DNA, 36 bp, Artificial Sequence
  Synthetic oligonucleotide
gaacgcgggtgactggcggccgtactggggtagaca

SEQ ID NO: 12563 - DNA, 37 bp, Artificial Sequence
  Synthetic oligonucleotide
gaattgccgctgcaaacatgttcggtactgtttagca

SEQ ID NO: 12564 - DNA, 35 bp, Artificial Sequence
  Synthetic oligonucleotide
gacacaaagcgacactacgtcaacactcatcaaca

SEQ ID NO: 12565 - DNA, 36 bp, Artificial Sequence
  Synthetic oligonucleotide
gacgacgtcgaggcgcctcggccatgttgatagcaa

SEQ ID NO: 12566 - DNA, 38 bp, Artificial Sequence
  Synthetic oligonucleotide
gacgaggaacaggcgcattagggacagcacgacggtga

SEQ ID NO: 12567 - DNA, 35 bp, Artificial Sequence
  Synthetic oligonucleotide
gacgagtgccggagtgcatacataagccctgataa

SEQ ID NO: 12568 - DNA, 35 bp, Artificial Sequence
  Synthetic oligonucleotide
gacgatcgagaaggtagggaatccgacgcaccagt

SEQ ID NO: 12569 - DNA, 35 bp, Artificial Sequence
  Synthetic oligonucleotide
gacgccaccagccgcccctcctcctatagacagtc

SEQ ID NO: 12570 - DNA, 37 bp, Artificial Sequence
  Synthetic oligonucleotide
gacgggccagacgtgtcatacgcgacatgtgattcga

SEQ ID NO: 12571 - DNA, 38 bp, Artificial Sequence
  Synthetic oligonucleotide
gacgggccaggctggtgaagttagcaagtgtagcttga

SEQ ID NO: 12572 - DNA, 35 bp, Artificial Sequence
  Synthetic oligonucleotide
gacgtgcgtagtgcaggagtcgtgaggtctactac

SEQ ID NO: 12573 - DNA, 36 bp, Artificial Sequence
  Synthetic oligonucleotide
gagccacgtcactcacgcgaacccaagacggttaga

SEQ ID NO: 12574 - DNA, 36 bp, Artificial Sequence
  Synthetic oligonucleotide
gagggaccaccacgagggacgtaatttcgaatccga

SEQ ID NO: 12575 - DNA, 37 bp, Artificial Sequence
  Synthetic oligonucleotide
gcaacgtaaccgcgccaagcacacacctacacattga

SEQ ID NO: 12576 - DNA, 35 bp, Artificial Sequence
  Synthetic oligonucleotide
gcacccgactcggttcagacagttcgaaatcgggg

SEQ ID NO: 12577 - DNA, 35 bp, Artificial Sequence
  Synthetic oligonucleotide
gcaccctgcgttcgatgacttgcactattgctcac

SEQ ID NO: 12578 - DNA, 37 bp, Artificial Sequence
  Synthetic oligonucleotide
gcagggccccaggcatgcacgagatccgagcggccga

SEQ ID NO: 12579 - DNA, 36 bp, Artificial Sequence
  Synthetic oligonucleotide
gccaacgcaccagaacatttgactggcatgcacgaa

SEQ ID NO: 12580 - DNA, 35 bp, Artificial Sequence
  Synthetic oligonucleotide
gccaatcatcacacgtaaactcgtaaatattcatt

SEQ ID NO: 12581 - DNA, 37 bp, Artificial Sequence
  Synthetic oligonucleotide
gccacaggcgtccggtaaaaggtcatgagctagacga

SEQ ID NO: 12582 - DNA, 36 bp, Artificial Sequence
  Synthetic oligonucleotide
gccgaagctcaggaaaccattgcaaggatacgttaa

SEQ ID NO: 12583 - DNA, 36 bp, Artificial Sequence
  Synthetic oligonucleotide
gccgatgcactgagcgaacccacaaaacggttacta

SEQ ID NO: 12584 - DNA, 36 bp, Artificial Sequence
  Synthetic oligonucleotide
gccgcccccccatgatggataattgcaggtttcgaa

SEQ ID NO: 12585 - DNA, 37 bp, Artificial Sequence
  Synthetic oligonucleotide
gcgaagccaggggacggaagacggtcgggacgttgga

SEQ ID NO: 12586 - DNA, 36 bp, Artificial Sequence
  Synthetic oligonucleotide
gcgagccccagatacgacagatacatcgagcacgta

SEQ ID NO: 12587 - DNA, 37 bp, Artificial Sequence
  Synthetic oligonucleotide
gctcgccgcacaattacttagcatctagcacttttga

SEQ ID NO: 12588 - DNA, 38 bp, Artificial Sequence
  Synthetic oligonucleotide
gctgggccgggggttcgtagcatcgaatccacaattga

SEQ ID NO: 12589 - DNA, 36 bp, Artificial Sequence
  Synthetic oligonucleotide
ggacaacagtaaagcatcaaaccccggcgcttagca

SEQ ID NO: 12590 - DNA, 38 bp, Artificial Sequence
  Synthetic oligonucleotide
ggacaccgcataactgacttatgttttcggactactga

SEQ ID NO: 12591 - DNA, 36 bp, Artificial Sequence
  Synthetic oligonucleotide
gtcacatgcgttgcggcataactggcatggattgta

SEQ ID NO: 12592 - DNA, 38 bp, Artificial Sequence
  Synthetic oligonucleotide
gtcgcgggccgctcgctacaagcttcagccttacatga

SEQ ID NO: 12593 - DNA, 37 bp, Artificial Sequence
  Synthetic oligonucleotide
gtgaaacgcgcgcaaggtctgcagttgtatcgctcga

SEQ ID NO: 12594 - DNA, 35 bp, Artificial Sequence
  Synthetic oligonucleotide
gtgcgatcccttgcacacgcatccaccacgtaacc

SEQ ID NO: 12595 - DNA, 36 bp, Artificial Sequence
  Synthetic oligonucleotide
gttgccgcaaaaaatgctttccgatagatcttgata

SEQ ID NO: 12596 - DNA, 35 bp, Artificial Sequence
  Synthetic oligonucleotide
tacgacgaagcagtctttgttatcattttttacgt

SEQ ID NO: 12597 - DNA, 35 bp, Artificial Sequence
  Synthetic oligonucleotide
tacgagtccgacagtacgcagacgagaacacgtta

SEQ ID NO: 12598 - DNA, 35 bp, Artificial Sequence
  Synthetic oligonucleotide
tacgccgggtgagtaaacaggtggaaggttctgga

SEQ ID NO: 12599 - DNA, 38 bp, Artificial Sequence
  Synthetic oligonucleotide
tcacgcccatcaggtgtccacttcttccgcaattatga

SEQ ID NO: 12600 - DNA, 37 bp, Artificial Sequence
  Synthetic oligonucleotide
tccacatgcgacgccgtgtccacagattccgagggga

SEQ ID NO: 12601 - DNA, 36 bp, Artificial Sequence
  Synthetic oligonucleotide
tcgaccctagctgccaggtaaagcttaacacgttaa

SEQ ID NO: 12602 - DNA, 36 bp, Artificial Sequence
  Synthetic oligonucleotide
tcgaccgaacgtagctagggggacactgataaggga

SEQ ID NO: 12603 - DNA, 36 bp, Artificial Sequence
  Synthetic oligonucleotide
tctgaccgcccaccgttattccgtcgcagtggaaca

SEQ ID NO: 12604 - DNA, 36 bp, Artificial Sequence
  Synthetic oligonucleotide
tgacatgcgcacgataccacatctctagcccaccta

SEQ ID NO: 12605 - DNA, 36 bp, Artificial Sequence
  Synthetic oligonucleotide
tgacgtgcaacggacggtggaatacgtaagacaaga

SEQ ID NO: 12606 - DNA, 37 bp, Artificial Sequence
  Synthetic oligonucleotide
tgcgtgctgcaacaatccatctaagaggctggtgcga

SEQ ID NO: 12607 - DNA, 35 bp, Artificial Sequence
  Synthetic oligonucleotide
tgtacgacacacgaacagcatcaccgcacaatatg

SEQ ID NO: 12608 - DNA, 38 bp, Artificial Sequence
  Synthetic oligonucleotide
tgttgcaccactcctgagatcgcgtacctgaagtttga

SEQ ID NO: 12609 - DNA, 36 bp, Artificial Sequence
  Synthetic oligonucleotide
aacacacgccggcgccactgaggaaccgtaagacta

SEQ ID NO: 12610 - DNA, 36 bp, Artificial Sequence
  Synthetic oligonucleotide
aacacgcagacgtcgcaacctgagagcagcaatcaa

SEQ ID NO: 12611 - DNA, 36 bp, Artificial Sequence
  Synthetic oligonucleotide
aacatcgcacccaaccagttaaatggcagtcgtaaa

SEQ ID NO: 12612 - DNA, 36 bp, Artificial Sequence
  Synthetic oligonucleotide
aacccacgacagacactttgtacgctctcaactgaa

SEQ ID NO: 12613 - DNA, 36 bp, Artificial Sequence
  Synthetic oligonucleotide
aatgcatcagccacccgcacagaacatcaagttgga

SEQ ID NO: 12614 - DNA, 35 bp, Artificial Sequence
  Synthetic oligonucleotide
acaccccgtaaccagctgggcacataatcgtacgg

SEQ ID NO: 12615 - DNA, 36 bp, Artificial Sequence
  Synthetic oligonucleotide
accaacccaaccccgctcacttctcttgagacagga

SEQ ID NO: 12616 - DNA, 38 bp, Artificial Sequence
  Synthetic oligonucleotide
accgacacagccctcgctaaacggttcgcgcttactga

SEQ ID NO: 12617 - DNA, 37 bp, Artificial Sequence
  Synthetic oligonucleotide
acgtgccatgtcatagaactgtgatggcctgttacga

SEQ ID NO: 12618 - DNA, 37 bp, Artificial Sequence
  Synthetic oligonucleotide
actcaccacagtgaggtaaacgcgctctcggttgaga

SEQ ID NO: 12619 - DNA, 36 bp, Artificial Sequence
  Synthetic oligonucleotide
actgaccccgtgaacgatcgcgcggctacccccata

SEQ ID NO: 12620 - DNA, 35 bp, Artificial Sequence
  Synthetic oligonucleotide
agaccgagcgcatcgattacgttacgagggccggg

SEQ ID NO: 12621 - DNA, 38 bp, Artificial Sequence
  Synthetic oligonucleotide
atacacgccgtcacacaaacatcctcgcagaccgctga

SEQ ID NO: 12622 - DNA, 35 bp, Artificial Sequence
  Synthetic oligonucleotide
atcaccagtcgagtgcaaacagccgcatgtcacgt

SEQ ID NO: 12623 - DNA, 38 bp, Artificial Sequence
  Synthetic oligonucleotide
atcacgcgttgacccccagcaggaaacgtggcccgtga

SEQ ID NO: 12624 - DNA, 35 bp, Artificial Sequence
  Synthetic oligonucleotide
atcagccgaggagaacggctctcctaatgtagtct

SEQ ID NO: 12625 - DNA, 35 bp, Artificial Sequence
  Synthetic oligonucleotide
atcgcacagtcccggtgcccaggtcaatgtagtca

SEQ ID NO: 12626 - DNA, 37 bp, Artificial Sequence
  Synthetic oligonucleotide
cggagacggtgttcgaagtatgggaggaagttttgga

SEQ ID NO: 12627 - DNA, 36 bp, Artificial Sequence
  Synthetic oligonucleotide
gaacgcgccgtgccaataacgtcccccctctctaca

SEQ ID NO: 12628 - DNA, 35 bp, Artificial Sequence
  Synthetic oligonucleotide
gaagccaacgtactacgagcaagacaggggggtct

SEQ ID NO: 12629 - DNA, 35 bp, Artificial Sequence
  Synthetic oligonucleotide
gacaacggcgataagtcaaggcggaccggtttagg

SEQ ID NO: 12630 - DNA, 38 bp, Artificial Sequence
  Synthetic oligonucleotide
gacacgatcagttaggtatggtcctatcggtgttatga

SEQ ID NO: 12631 - DNA, 36 bp, Artificial Sequence
  Synthetic oligonucleotide
gacacgcacctaggactgaaacaagccaacgtttca

SEQ ID NO: 12632 - DNA, 36 bp, Artificial Sequence
  Synthetic oligonucleotide
gacgacactcggaaagggtcataggtacactcggaa

SEQ ID NO: 12633 - DNA, 37 bp, Artificial Sequence
  Synthetic oligonucleotide
gacgacgaaccgataaccttagatggtctcatgtgga

SEQ ID NO: 12634 - DNA, 38 bp, Artificial Sequence
  Synthetic oligonucleotide
gacgatacggcggactcttatacgatagcgttaaatga

SEQ ID NO: 12635 - DNA, 35 bp, Artificial Sequence
  Synthetic oligonucleotide
gacgcgcgcaggagggagctatccacatgtgcacg

SEQ ID NO: 12636 - DNA, 38 bp, Artificial Sequence
  Synthetic oligonucleotide
gacggatccgtgatggatagggtccgagcaggtgctga

SEQ ID NO: 12637 - DNA, 38 bp, Artificial Sequence
  Synthetic oligonucleotide
gacgtcacgaagctgttgatctcgcagaacgggcctga

SEQ ID NO: 12638 - DNA, 36 bp, Artificial Sequence
  Synthetic oligonucleotide
gactctcgtccacaagctgtagtcgaaccttgccta

SEQ ID NO: 12639 - DNA, 36 bp, Artificial Sequence
  Synthetic oligonucleotide
gagacacgccagagtattaacgcaggcacgcttgca

SEQ ID NO: 12640 - DNA, 37 bp, Artificial Sequence
  Synthetic oligonucleotide
gaggaagggggccagatgaattatcgtaaagcgagga

SEQ ID NO: 12641 - DNA, 37 bp, Artificial Sequence
  Synthetic oligonucleotide
gcacacaccgtacacgtaattgacgtaactgcgttga

SEQ ID NO: 12642 - DNA, 35 bp, Artificial Sequence
  Synthetic oligonucleotide
gcacgacgacagatctagtcaaggctcgtgtccct

SEQ ID NO: 12643 - DNA, 35 bp, Artificial Sequence
  Synthetic oligonucleotide
gcatgcattaaggaatatcaagtgagcaccattgt

SEQ ID NO: 12644 - DNA, 37 bp, Artificial Sequence
  Synthetic oligonucleotide
gccccactcggtctgggtatgaacgaggcgtatctga

SEQ ID NO: 12645 - DNA, 37 bp, Artificial Sequence
  Synthetic oligonucleotide
gcccgacgaggtgtacgggatttggggtcgtggagga

SEQ ID NO: 12646 - DNA, 38 bp, Artificial Sequence
  Synthetic oligonucleotide
gccgaactgcagcacacccatgagaaatgtcatcgtga

SEQ ID NO: 12647 - DNA, 38 bp, Artificial Sequence
  Synthetic oligonucleotide
gcctgccccggaagaatggagaagcggctattacctga

SEQ ID NO: 12648 - DNA, 37 bp, Artificial Sequence
  Synthetic oligonucleotide
gcgatgtccaatgtgtagggtacgactgaagatcaga

SEQ ID NO: 12649 - DNA, 37 bp, Artificial Sequence
  Synthetic oligonucleotide
gcgcccatacggggggcacggggacagccaattgcga

SEQ ID NO: 12650 - DNA, 36 bp, Artificial Sequence
  Synthetic oligonucleotide
gtcgacgcacggtctttgtgcaagctttctgtcgga

SEQ ID NO: 12651 - DNA, 38 bp, Artificial Sequence
  Synthetic oligonucleotide
gtgaggtcaaggaggtttgccacttcagtcatcggtga

SEQ ID NO: 12652 - DNA, 38 bp, Artificial Sequence
  Synthetic oligonucleotide
gtgatgcaaggtgtagagcacgggtgtgtaaatggtga

SEQ ID NO: 12653 - DNA, 35 bp, Artificial Sequence
  Synthetic oligonucleotide
gtgccccacaagtgaccaggaatccctttgtataa

SEQ ID NO: 12654 - DNA, 36 bp, Artificial Sequence
  Synthetic oligonucleotide
gtgccgtatcagtcggttacaagggtggtctgccta

SEQ ID NO: 12655 - DNA, 37 bp, Artificial Sequence
  Synthetic oligonucleotide
gtgcgccagtcgccagtccgtacaggaggaatattga

SEQ ID NO: 12656 - DNA, 38 bp, Artificial Sequence
  Synthetic oligonucleotide
gtggacgcaacggcctagaccaagcattatcaatatga

SEQ ID NO: 12657 - DNA, 36 bp, Artificial Sequence
  Synthetic oligonucleotide
gttgagccggaccggcggaaacacgccctatagtta

SEQ ID NO: 12658 - DNA, 35 bp, Artificial Sequence
  Synthetic oligonucleotide
taacgcgcatcgcacctatctctcgatcttgctta

SEQ ID NO: 12659 - DNA, 37 bp, Artificial Sequence
  Synthetic oligonucleotide
tacacggaccatgtcctcacatgtccaatccatccga

SEQ ID NO: 12660 - DNA, 35 bp, Artificial Sequence
  Synthetic oligonucleotide
taccaagggccactcttacatagctttacgtcctg

SEQ ID NO: 12661 - DNA, 36 bp, Artificial Sequence
  Synthetic oligonucleotide
tacccacgccgcacattgtgcttgttctcacgacca

SEQ ID NO: 12662 - DNA, 35 bp, Artificial Sequence
  Synthetic oligonucleotide
taccgaagccggtaactactggcacctttgtttac

SEQ ID NO: 12663 - DNA, 37 bp, Artificial Sequence
  Synthetic oligonucleotide
tacctcggtacagcctcccacaaacagtcacggttga

SEQ ID NO: 12664 - DNA, 35 bp, Artificial Sequence
  Synthetic oligonucleotide
tacgccccagcgtaatgagtagaagcttgggtctg

SEQ ID NO: 12665 - DNA, 34 bp, Artificial Sequence
  Synthetic oligonucleotide
tacgcgcctcgttccatgtcgctgctgggaccgt

SEQ ID NO: 12666 - DNA, 35 bp, Artificial Sequence
  Synthetic oligonucleotide
tactgacacgcaatcagtcaaatacagtccgactt

SEQ ID NO: 12667 - DNA, 35 bp, Artificial Sequence
  Synthetic oligonucleotide
tatgcctgcatgccgactcggatgttagtccgaaa

SEQ ID NO: 12668 - DNA, 36 bp, Artificial Sequence
  Synthetic oligonucleotide
tcaagggcccatcaagatggaaacaagtgggtggca

SEQ ID NO: 12669 - DNA, 36 bp, Artificial Sequence
  Synthetic oligonucleotide
tcacgcagaccacatgctcttcattgcctcttttaa

SEQ ID NO: 12670 - DNA, 35 bp, Artificial Sequence
  Synthetic oligonucleotide
tcactgtcacagtgctatagcgggctaacgaatgc

SEQ ID NO: 12671 - DNA, 35 bp, Artificial Sequence
  Synthetic oligonucleotide
tccagtccggaggaactcgcgtcattccacgagta

SEQ ID NO: 12672 - DNA, 38 bp, Artificial Sequence
  Synthetic oligonucleotide
tgactagcggcagtccctcaacatggccgtccctttgt

SEQ ID NO: 12673 - DNA, 37 bp, Artificial Sequence
  Synthetic oligonucleotide
tgagcggaggtgctcaatgcgccaggaatgtcgagga

SEQ ID NO: 12674 - DNA, 35 bp, Artificial Sequence
  Synthetic oligonucleotide
tgatgctccgacgaatagtctcggagtaagcaatg

SEQ ID NO: 12675 - DNA, 37 bp, Artificial Sequence
  Synthetic oligonucleotide
tgcacaacggctctacaaaagttcctgacgacgttga

SEQ ID NO: 12676 - DNA, 36 bp, Artificial Sequence
  Synthetic oligonucleotide
aacaaccacggccacctttccgattgttatacgcga

SEQ ID NO: 12677 - DNA, 38 bp, Artificial Sequence
  Synthetic oligonucleotide
aacgaagtggacggtacagaagtgtagggactccctga

SEQ ID NO: 12678 - DNA, 36 bp, Artificial Sequence
  Synthetic oligonucleotide
acacaccgacaactgtaatggtgccatattcgtgga

SEQ ID NO: 12679 - DNA, 37 bp, Artificial Sequence
  Synthetic oligonucleotide
acaccccgggccgtcagaactacgggatgccactaga

SEQ ID NO: 12680 - DNA, 35 bp, Artificial Sequence
  Synthetic oligonucleotide
acagacagggccccaatccgtagagtactgcgatt

SEQ ID NO: 12681 - DNA, 37 bp, Artificial Sequence
  Synthetic oligonucleotide
acatgcaccacgtggaagtgggaacgacatttgtgga

SEQ ID NO: 12682 - DNA, 36 bp, Artificial Sequence
  Synthetic oligonucleotide
accacacgcagatcaacataaaggaggctagttcca

SEQ ID NO: 12683 - DNA, 37 bp, Artificial Sequence
  Synthetic oligonucleotide
acccacatcctcggtaggtacctctaattagaacgga

SEQ ID NO: 12684 - DNA, 38 bp, Artificial Sequence
  Synthetic oligonucleotide
acccgcgcaacatccgtaaggatgacaatcggacgtga

SEQ ID NO: 12685 - DNA, 36 bp, Artificial Sequence
  Synthetic oligonucleotide
acgtacctgccggagcactttcagagtgttgctggt

SEQ ID NO: 12686 - DNA, 38 bp, Artificial Sequence
  Synthetic oligonucleotide
atcgacaagccgtaacatggcgtatcgatgtctgctga

SEQ ID NO: 12687 - DNA, 37 bp, Artificial Sequence
  Synthetic oligonucleotide
atcgacggaaggtgtaaatttcgatcaattttgttga

SEQ ID NO: 12688 - DNA, 37 bp, Artificial Sequence
  Synthetic oligonucleotide
atcgccgccaagcatctaaacgccaatcagggattga

SEQ ID NO: 12689 - DNA, 35 bp, Artificial Sequence
  Synthetic oligonucleotide
atgcacccaacccagaattatgttaacgacaatgg

SEQ ID NO: 12690 - DNA, 35 bp, Artificial Sequence
  Synthetic oligonucleotide
atgcatgaccagaaccttctgcgtgcgtagtgccc

SEQ ID NO: 12691 - DNA, 37 bp, Artificial Sequence
  Synthetic oligonucleotide
attgacgcacattgtcacgaatcaccgtcgtctccga

SEQ ID NO: 12692 - DNA, 38 bp, Artificial Sequence
  Synthetic oligonucleotide
gaaccgcccgtgttaagggttagagtgcccgatcatga

SEQ ID NO: 12693 - DNA, 38 bp, Artificial Sequence
  Synthetic oligonucleotide
gacaaccgccggcaatatgagccagccctcctcactga

SEQ ID NO: 12694 - DNA, 36 bp, Artificial Sequence
  Synthetic oligonucleotide
gacatcgctatgcagtgcacacttactggagaacga

SEQ ID NO: 12695 - DNA, 38 bp, Artificial Sequence
  Synthetic oligonucleotide
gaccacaacagtatccgtggttatcaggaggtacatga

SEQ ID NO: 12696 - DNA, 37 bp, Artificial Sequence
  Synthetic oligonucleotide
gaccctgggagtcggaatgctatgtagcaaggccaga

SEQ ID NO: 12697 - DNA, 35 bp, Artificial Sequence
  Synthetic oligonucleotide
gacgagcaaagtgcgcgatccgataagttgccttc

SEQ ID NO: 12698 - DNA, 36 bp, Artificial Sequence
  Synthetic oligonucleotide
gacgcaacaggtggcatatcagcggttacatactga

SEQ ID NO: 12699 - DNA, 37 bp, Artificial Sequence
  Synthetic oligonucleotide
gacgcagtagtcacggtgcgcatagatcaagttttga

SEQ ID NO: 12700 - DNA, 36 bp, Artificial Sequence
  Synthetic oligonucleotide
gacgcggtaaagatataaggctcatcattaataata

SEQ ID NO: 12701 - DNA, 36 bp, Artificial Sequence
  Synthetic oligonucleotide
gactgctgatctcacgctacaaagatgctgggcgca

SEQ ID NO: 12702 - DNA, 36 bp, Artificial Sequence
  Synthetic oligonucleotide
gagacgcaaggtgctcacaaaacaattacttcggta

SEQ ID NO: 12703 - DNA, 36 bp, Artificial Sequence
  Synthetic oligonucleotide
gatcgagcaacctaagttatttagctgagcgtagga

SEQ ID NO: 12704 - DNA, 37 bp, Artificial Sequence
  Synthetic oligonucleotide
gatgcactggactgctagggcagcacgtacgcaagga

SEQ ID NO: 12705 - DNA, 36 bp, Artificial Sequence
  Synthetic oligonucleotide
gcaacgccattcaccgagtggatattgggatatcga

SEQ ID NO: 12706 - DNA, 36 bp, Artificial Sequence
  Synthetic oligonucleotide
gcacacgacaactacccgaatcggccccgtatgcga

SEQ ID NO: 12707 - DNA, 36 bp, Artificial Sequence
  Synthetic oligonucleotide
gcacgaggtggttcgttccataaggggctctgtgga

SEQ ID NO: 12708 - DNA, 35 bp, Artificial Sequence
  Synthetic oligonucleotide
gcactgtccgtcactgcctctcgcgggttcaatcc

SEQ ID NO: 12709 - DNA, 36 bp, Artificial Sequence
  Synthetic oligonucleotide
gcaggacggtgcgtactgcaagtcgtgaccgaggta

SEQ ID NO: 12710 - DNA, 35 bp, Artificial Sequence
  Synthetic oligonucleotide
gccaacgcctcaacttaatgcacgttccaataggg

SEQ ID NO: 12711 - DNA, 38 bp, Artificial Sequence
  Synthetic oligonucleotide
gcccacccaccccgacaataggaaagcgcttttactga

SEQ ID NO: 12712 - DNA, 37 bp, Artificial Sequence
  Synthetic oligonucleotide
gcccgggctgagatcttgaggacatctggacaataga

SEQ ID NO: 12713 - DNA, 35 bp, Artificial Sequence
  Synthetic oligonucleotide
gccctcgccaactctgacatgctagctcaccacat

SEQ ID NO: 12714 - DNA, 35 bp, Artificial Sequence
  Synthetic oligonucleotide
gccgacgtcctccggcgctacctacagttccatca

SEQ ID NO: 12715 - DNA, 37 bp, Artificial Sequence
  Synthetic oligonucleotide
gccgagagggtgtcgacgtaaagtccagtggcggtga

SEQ ID NO: 12716 - DNA, 36 bp, Artificial Sequence
  Synthetic oligonucleotide
gccgtgggcatgcacggcaacatttctttttaccca

SEQ ID NO: 12717 - DNA, 35 bp, Artificial Sequence
  Synthetic oligonucleotide
gcgaaccgtctacacagtggtcgtctaggcatggt

SEQ ID NO: 12718 - DNA, 38 bp, Artificial Sequence
  Synthetic oligonucleotide
gcgacctaccggggtgaaaacgggtctgccggtggtga

SEQ ID NO: 12719 - DNA, 36 bp, Artificial Sequence
  Synthetic oligonucleotide
gctgagctgcagaagcaacactttcgtattcgtgga

SEQ ID NO: 12720 - DNA, 35 bp, Artificial Sequence
  Synthetic oligonucleotide
ggacaacgagggcgctgagaaagaaggcagacagc

SEQ ID NO: 12721 - DNA, 35 bp, Artificial Sequence
  Synthetic oligonucleotide
gtcgaacaggagcacttgatgacgtgtgtcacgaa

SEQ ID NO: 12722 - DNA, 35 bp, Artificial Sequence
  Synthetic oligonucleotide
gtgaccctaccgcatagactgacatcaggctgaac

SEQ ID NO: 12723 - DNA, 37 bp, Artificial Sequence
  Synthetic oligonucleotide
gtgacgacgaatgtatgaaatactgctgcctgcacga

SEQ ID NO: 12724 - DNA, 37 bp, Artificial Sequence
  Synthetic oligonucleotide
gtgacgacgtaacaaactttgcagtggtcgtagccga

SEQ ID NO: 12725 - DNA, 35 bp, Artificial Sequence
  Synthetic oligonucleotide
gtgatgccggtcacgtgcatctgaatacatttttg

SEQ ID NO: 12726 - DNA, 37 bp, Artificial Sequence
  Synthetic oligonucleotide
gtgatgccggtgggttaacgacaggcgtcctggtgga

SEQ ID NO: 12727 - DNA, 36 bp, Artificial Sequence
  Synthetic oligonucleotide
gtggcggaccatatcggcacaacaggcataatacga

SEQ ID NO: 12728 - DNA, 36 bp, Artificial Sequence
  Synthetic oligonucleotide
gtggggtggcgtacggtaccgacgacgaatacacga

SEQ ID NO: 12729 - DNA, 37 bp, Artificial Sequence
  Synthetic oligonucleotide
gttgcacaggtggaatccctaagtcactcgtgcacga

SEQ ID NO: 12730 - DNA, 38 bp, Artificial Sequence
  Synthetic oligonucleotide
tacacagcaccacattgtgactgtgaggtcgctactga

SEQ ID NO: 12731 - DNA, 38 bp, Artificial Sequence
  Synthetic oligonucleotide
taccatgctcacccaatggagtatagtttcgttcgtga

SEQ ID NO: 12732 - DNA, 35 bp, Artificial Sequence
  Synthetic oligonucleotide
tacgtcgagcgcccacgcgtagataaatgtattgg

SEQ ID NO: 12733 - DNA, 36 bp, Artificial Sequence
  Synthetic oligonucleotide
tatgctccatgcaccacgaacggcccttactcgtga

SEQ ID NO: 12734 - DNA, 37 bp, Artificial Sequence
  Synthetic oligonucleotide
tcaacacccatccgctcgctgcaagttaacaatacga

SEQ ID NO: 12735 - DNA, 38 bp, Artificial Sequence
  Synthetic oligonucleotide
tcaacgaaaccgtcagggaacaagccagcacgctttga

SEQ ID NO: 12736 - DNA, 37 bp, Artificial Sequence
  Synthetic oligonucleotide
tcacacaaagcaccggtgcattagaggatcacggcaa

SEQ ID NO: 12737 - DNA, 37 bp, Artificial Sequence
  Synthetic oligonucleotide
tccacgcaacgcggggacgtgctcaatcaatgtacaa

SEQ ID NO: 12738 - DNA, 36 bp, Artificial Sequence
  Synthetic oligonucleotide
tcgatcgcatccctgagcgtaaagggcaagagagca

SEQ ID NO: 12739 - DNA, 36 bp, Artificial Sequence
  Synthetic oligonucleotide
tgaacaggccgccgctcgaacacacgatccttgtta

SEQ ID NO: 12740 - DNA, 35 bp, Artificial Sequence
  Synthetic oligonucleotide
tgcataccgcccaatgaacccccgtgtcgattcca

SEQ ID NO: 12741 - DNA, 35 bp, Artificial Sequence
  Synthetic oligonucleotide
tgccccggtcaagggcacgactccactgtcaagtt

SEQ ID NO: 12742 - DNA, 38 bp, Artificial Sequence
  Synthetic oligonucleotide
tgcgacaacaggggggaccgccgtgaaattgggattga

SEQ ID NO: 12743 - DNA, 37 bp, Artificial Sequence
  Synthetic oligonucleotide
tgcgacgccacgcactccagttgtctagtctcgttga

SEQ ID NO: 12744 - DNA, 37 bp, Artificial Sequence
  Synthetic oligonucleotide
tgtgcaaacgtcaccatgatcagaaccacttcgctga

SEQ ID NO: 12745 - DNA, 36 bp, Artificial Sequence
  Synthetic oligonucleotide
tgtgcccagacgaaccaacattgggtaacgaactca

SEQ ID NO: 12746 - DNA, 35 bp, Artificial Sequence
  Synthetic oligonucleotide
tgtgggtcgcgcaaactatttgagcatagtcactc

SEQ ID NO: 12747 - DNA, 35 bp, Artificial Sequence
  Synthetic oligonucleotide
tgttgcccagtctcgcgcaatcggtcagttaggct

SEQ ID NO: 12748 - DNA, 35 bp, Artificial Sequence
  Synthetic oligonucleotide
ttgacgccagtcccggatatactacaggcaccaga

SEQ ID NO: 12749 - DNA, 36 bp, Artificial Sequence
  Synthetic oligonucleotide
aacctgacgaccccgccgcacgaggttaggactgga

SEQ ID NO: 12750 - DNA, 38 bp, Artificial Sequence
  Synthetic oligonucleotide
acacacgacgaccctaacgtaagagagggattccctga

SEQ ID NO: 12751 - DNA, 36 bp, Artificial Sequence
  Synthetic oligonucleotide
acagcccgtcgtgcattagggaagctccgtgtctga

SEQ ID NO: 12752 - DNA, 36 bp, Artificial Sequence
  Synthetic oligonucleotide
acatcaccgcgggtggtcccagccatccgtcgaaca

SEQ ID NO: 12753 - DNA, 38 bp, Artificial Sequence
  Synthetic oligonucleotide
accaccaaccgacgaggcaggatcaagctgcagtgtga

SEQ ID NO: 12754 - DNA, 36 bp, Artificial Sequence
  Synthetic oligonucleotide
acccgccgcgatgcctagatgcatgtaacgtacgca

SEQ ID NO: 12755 - DNA, 38 bp, Artificial Sequence
  Synthetic oligonucleotide
acgaacggggcgccaggtaacgtaaaacatctctttga

SEQ ID NO: 12756 - DNA, 38 bp, Artificial Sequence
  Synthetic oligonucleotide
aggccagacgcagcctaagttcttacgtgacgctgtga

SEQ ID NO: 12757 - DNA, 36 bp, Artificial Sequence
  Synthetic oligonucleotide
atagccaacggcaagatattattaaagtcgtgctga

SEQ ID NO: 12758 - DNA, 37 bp, Artificial Sequence
  Synthetic oligonucleotide
atgcgccgcacaggatagtcaagcaggtatcgttcga

SEQ ID NO: 12759 - DNA, 34 bp, Artificial Sequence
  Synthetic oligonucleotide
atggacaggtggccgctcttataaggaccttaat

SEQ ID NO: 12760 - DNA, 36 bp, Artificial Sequence
  Synthetic oligonucleotide
cgcggtcggtgtgagcgctaaagagttccaggagaa

SEQ ID NO: 12761 - DNA, 37 bp, Artificial Sequence
  Synthetic oligonucleotide
gaagcccgggcggtctacaaggacggttggatgggga

SEQ ID NO: 12762 - DNA, 35 bp, Artificial Sequence
  Synthetic oligonucleotide
gaatccacagctgttcatgcgtcaacagggtggcc

SEQ ID NO: 12763 - DNA, 35 bp, Artificial Sequence
  Synthetic oligonucleotide
gacaaacgtactggctgttctacgttggaagacgt

SEQ ID NO: 12764 - DNA, 37 bp, Artificial Sequence
  Synthetic oligonucleotide
gacaacacagacgagcttaacagaggttggcgtatga

SEQ ID NO: 12765 - DNA, 36 bp, Artificial Sequence
  Synthetic oligonucleotide
gacagaccgcaccagacatgtttctcgtacgccaca

SEQ ID NO: 12766 - DNA, 35 bp, Artificial Sequence
  Synthetic oligonucleotide
gaccaccggtccttcgcatgcacaccaaaccgttc

SEQ ID NO: 12767 - DNA, 36 bp, Artificial Sequence
  Synthetic oligonucleotide
gacgaaggtcggaggtactcagtcgatccatgcaga

SEQ ID NO: 12768 - DNA, 35 bp, Artificial Sequence
  Synthetic oligonucleotide
gacgaccggacagattcaagtagacgcgttggttg

SEQ ID NO: 12769 - DNA, 38 bp, Artificial Sequence
  Synthetic oligonucleotide
gacgaggatgggagcgagaatgcgtctaacgtttgtga

SEQ ID NO: 12770 - DNA, 37 bp, Artificial Sequence
  Synthetic oligonucleotide
gacgcaacacctgtcgcgaacgaaccacccatcacga

SEQ ID NO: 12771 - DNA, 38 bp, Artificial Sequence
  Synthetic oligonucleotide
gacgcaagcatggactgtggaatacagtattcacctga

SEQ ID NO: 12772 - DNA, 36 bp, Artificial Sequence
  Synthetic oligonucleotide
gacgccgacggggagtactgtacaaggcacgacaga

SEQ ID NO: 12773 - DNA, 36 bp, Artificial Sequence
  Synthetic oligonucleotide
gactgcggtcacaaaacctgtatccgtcatctgata

SEQ ID NO: 12774 - DNA, 35 bp, Artificial Sequence
  Synthetic oligonucleotide
gagtccccagactccgagagcaacagcgcatactg

SEQ ID NO: 12775 - DNA, 36 bp, Artificial Sequence
  Synthetic oligonucleotide
gatccaaggcggaacagagatgtttgcgggtgggaa

SEQ ID NO: 12776 - DNA, 35 bp, Artificial Sequence
  Synthetic oligonucleotide
gatcgcaactcgcggtggttttaatgtctggatgt

SEQ ID NO: 12777 - DNA, 38 bp, Artificial Sequence
  Synthetic oligonucleotide
gatgcgggcatcaagtctgacaccacagtccagcgtga

SEQ ID NO: 12778 - DNA, 36 bp, Artificial Sequence
  Synthetic oligonucleotide
gatggccacgcacaaacttggtgtcaaccacatgca

SEQ ID NO: 12779 - DNA, 35 bp, Artificial Sequence
  Synthetic oligonucleotide
gccaccacaagttgctccgagcaggctctttgaac

SEQ ID NO: 12780 - DNA, 37 bp, Artificial Sequence
  Synthetic oligonucleotide
gccacctggccggtgtaccaggaacgagtttggggga

SEQ ID NO: 12781 - DNA, 36 bp, Artificial Sequence
  Synthetic oligonucleotide
gccgacagtccgcaatgctgttacgctgttccccca

SEQ ID NO: 12782 - DNA, 36 bp, Artificial Sequence
  Synthetic oligonucleotide
gccgaggaacgatgcggtcaaaaaggcaggtcctga

SEQ ID NO: 12783 - DNA, 37 bp, Artificial Sequence
  Synthetic oligonucleotide
gccgatcaaagttcgtcccttctttcgcctgagacga

SEQ ID NO: 12784 - DNA, 36 bp, Artificial Sequence
  Synthetic oligonucleotide
gcgaagggctgaacattgggatggagatgtcgagca

SEQ ID NO: 12785 - DNA, 37 bp, Artificial Sequence
  Synthetic oligonucleotide
gcgacgatcgcaactaggtagaagacgttcagccaga

SEQ ID NO: 12786 - DNA, 38 bp, Artificial Sequence
  Synthetic oligonucleotide
gctacacccatgatgattctgccgcctgtacagactga

SEQ ID NO: 12787 - DNA, 37 bp, Artificial Sequence
  Synthetic oligonucleotide
ggacaaagccggccactgtctcgacgccatgcaccga

SEQ ID NO: 12788 - DNA, 35 bp, Artificial Sequence
  Synthetic oligonucleotide
ggacgggaatcgcaatatcgtcgtaaggtgtcttt

SEQ ID NO: 12789 - DNA, 38 bp, Artificial Sequence
  Synthetic oligonucleotide
ggatgatcgcagaggactaagcgaaatctagagtgtga

SEQ ID NO: 12790 - DNA, 38 bp, Artificial Sequence
  Synthetic oligonucleotide
gtcacggagtgcatgatgaatgaagtacaggggggtga

SEQ ID NO: 12791 - DNA, 38 bp, Artificial Sequence
  Synthetic oligonucleotide
gtgtgcacgtgtgactgcccctgtagatcgttgactga

SEQ ID NO: 12792 - DNA, 35 bp, Artificial Sequence
  Synthetic oligonucleotide
taacagccatgccgcgactaacattcacactgacc

SEQ ID NO: 12793 - DNA, 35 bp, Artificial Sequence
  Synthetic oligonucleotide
taacgcccgcaccaaccactagtgttaaatgaagg

SEQ ID NO: 12794 - DNA, 36 bp, Artificial Sequence
  Synthetic oligonucleotide
tacacgcgcggatacggtacgaagagattaaagcta

SEQ ID NO: 12795 - DNA, 35 bp, Artificial Sequence
  Synthetic oligonucleotide
tacgacgcgcaatctcaaccatttcacccaccatt

SEQ ID NO: 12796 - DNA, 36 bp, Artificial Sequence
  Synthetic oligonucleotide
tacgaggcgaggtcgtcgcttgtgtgaggcaactca

SEQ ID NO: 12797 - DNA, 35 bp, Artificial Sequence
  Synthetic oligonucleotide
tagacacatcggatacgatggtactgaagaacact

SEQ ID NO: 12798 - DNA, 38 bp, Artificial Sequence
  Synthetic oligonucleotide
tcaactcgcaaccagatccactcgtatccgagacgtga

SEQ ID NO: 12799 - DNA, 35 bp, Artificial Sequence
  Synthetic oligonucleotide
tcacacaccgcatactgagcaacgagtcttttccg

SEQ ID NO: 12800 - DNA, 37 bp, Artificial Sequence
  Synthetic oligonucleotide
tccagacccccagactcgccaactgacaaggggggga

SEQ ID NO: 12801 - DNA, 38 bp, Artificial Sequence
  Synthetic oligonucleotide
tcccgaccccagtacacgcagttagccagttttaatga

SEQ ID NO: 12802 - DNA, 35 bp, Artificial Sequence
  Synthetic oligonucleotide
tccgccgcaaggagcgatgcttaccactcatgaca

SEQ ID NO: 12803 - DNA, 37 bp, Artificial Sequence
  Synthetic oligonucleotide
tgcacgccaaagttgataccgtgcgattaccaaccga

SEQ ID NO: 12804 - DNA, 38 bp, Artificial Sequence
  Synthetic oligonucleotide
tgccagggcctaatatacacgacgcaggacttccatga

SEQ ID NO: 12805 - DNA, 37 bp, Artificial Sequence
  Synthetic oligonucleotide
tttgcgcacatgcgtacaacaccgaattcgacaaaga

SEQ ID NO: 12806 - DNA, 36 bp, Artificial Sequence
  Synthetic oligonucleotide
aacacccgcaacggattattttggaggcaagtacga

SEQ ID NO: 12807 - DNA, 35 bp, Artificial Sequence
  Synthetic oligonucleotide
aacaccgaagagcggattgtagaccacggtgggtc

SEQ ID NO: 12808 - DNA, 36 bp, Artificial Sequence
  Synthetic oligonucleotide
aacacgcggaccagctcgtaataggcccgtggacta

SEQ ID NO: 12809 - DNA, 35 bp, Artificial Sequence
  Synthetic oligonucleotide
aaccaccacggactcatttgtatgtccgctgccca

SEQ ID NO: 12810 - DNA, 35 bp, Artificial Sequence
  Synthetic oligonucleotide
aaccgcaaccatcctgccctccagtaccgctatca

SEQ ID NO: 12811 - DNA, 36 bp, Artificial Sequence
  Synthetic oligonucleotide
acacacgtaagaatagctgacaatgctgaaccacga

SEQ ID NO: 12812 - DNA, 37 bp, Artificial Sequence
  Synthetic oligonucleotide
acacgccgcccgcctataaagggacgccctttaagga

SEQ ID NO: 12813 - DNA, 36 bp, Artificial Sequence
  Synthetic oligonucleotide
acatccgccagtccccgtgtaagcgcatggtaggaa

SEQ ID NO: 12814 - DNA, 38 bp, Artificial Sequence
  Synthetic oligonucleotide
accaagtgcggggcgaaaaaagcgttacctgtcggtga

SEQ ID NO: 12815 - DNA, 35 bp, Artificial Sequence
  Synthetic oligonucleotide
accaccatcgcatgagtccgagtcgcctttcctta

SEQ ID NO: 12816 - DNA, 34 bp, Artificial Sequence
  Synthetic oligonucleotide
acccgacgcgtgaatcggtgcccacataaacgga

SEQ ID NO: 12817 - DNA, 36 bp, Artificial Sequence
  Synthetic oligonucleotide
accgcaaaagtgcagtctcacacaccaagataccca

SEQ ID NO: 12818 - DNA, 38 bp, Artificial Sequence
  Synthetic oligonucleotide
acgcatccacgaaacggtttggttcaggaacagtgtga

SEQ ID NO: 12819 - DNA, 35 bp, Artificial Sequence
  Synthetic oligonucleotide
actgccgggcaatatgccaaatcgaggcacatcac

SEQ ID NO: 12820 - DNA, 35 bp, Artificial Sequence
  Synthetic oligonucleotide
atcgcacgcctccattcctaccgcgataagtccca

SEQ ID NO: 12821 - DNA, 36 bp, Artificial Sequence
  Synthetic oligonucleotide
atgcacacctggctgtaaactgccacatgtctaaca

SEQ ID NO: 12822 - DNA, 35 bp, Artificial Sequence
  Synthetic oligonucleotide
atgcccggtcgaacaggtagacaatacgcttcacg

SEQ ID NO: 12823 - DNA, 36 bp, Artificial Sequence
  Synthetic oligonucleotide
atgcgcaaggcaagatctgctatcagaggatgcgta

SEQ ID NO: 12824 - DNA, 38 bp, Artificial Sequence
  Synthetic oligonucleotide
attccgccacaggatgagctgctccccacatgtcatga

SEQ ID NO: 12825 - DNA, 36 bp, Artificial Sequence
  Synthetic oligonucleotide
gaatggggcacattcaaagcatggaggtcaagctta

SEQ ID NO: 12826 - DNA, 35 bp, Artificial Sequence
  Synthetic oligonucleotide
gacaacacacacggcaaacgctattgttctcctac

SEQ ID NO: 12827 - DNA, 36 bp, Artificial Sequence
  Synthetic oligonucleotide
gacaacagctgccaaaaatcgtggtgttgcacttaa

SEQ ID NO: 12828 - DNA, 38 bp, Artificial Sequence
  Synthetic oligonucleotide
gacaaccgcacacccggaattcagtacgtaagtcttga

SEQ ID NO: 12829 - DNA, 36 bp, Artificial Sequence
  Synthetic oligonucleotide
gacacgtctacgaaggggaagaccacagtgctatga

SEQ ID NO: 12830 - DNA, 37 bp, Artificial Sequence
  Synthetic oligonucleotide
gacagggggccatgagtcaatagggttcgtagtgaga

SEQ ID NO: 12831 - DNA, 35 bp, Artificial Sequence
  Synthetic oligonucleotide
gaccacgcagaagattcaagttgcgctaggccaag

SEQ ID NO: 12832 - DNA, 35 bp, Artificial Sequence
  Synthetic oligonucleotide
gacgatacgagcagaacaactaagagaaaggcaca

SEQ ID NO: 12833 - DNA, 38 bp, Artificial Sequence
  Synthetic oligonucleotide
gacgcactagtgggacgtctaagaactatggaaattga

SEQ ID NO: 12834 - DNA, 36 bp, Artificial Sequence
  Synthetic oligonucleotide
gacgggaacgcatgctggcttgcctcgacttttgaa

SEQ ID NO: 12835 - DNA, 36 bp, Artificial Sequence
  Synthetic oligonucleotide
gaggacgacggaagggaataacggaggtgggtacga

SEQ ID NO: 12836 - DNA, 35 bp, Artificial Sequence
  Synthetic oligonucleotide
gatgtagtcaacagcgtgtagtgcatgacacatat

SEQ ID NO: 12837 - DNA, 38 bp, Artificial Sequence
  Synthetic oligonucleotide
gatgtccccagctcgacgctcccaggcaagctctatga

SEQ ID NO: 12838 - DNA, 35 bp, Artificial Sequence
  Synthetic oligonucleotide
gcaacacaggtgacaacctaaaaacgccttcccgg

SEQ ID NO: 12839 - DNA, 35 bp, Artificial Sequence
  Synthetic oligonucleotide
gcacagcaagtatcgtgttcgtccctcgctatttc

SEQ ID NO: 12840 - DNA, 37 bp, Artificial Sequence
  Synthetic oligonucleotide
gcaccaagctgccatagtcgccaattacgtcaacgga

SEQ ID NO: 12841 - DNA, 36 bp, Artificial Sequence
  Synthetic oligonucleotide
gcacgccactcttaggctcttaacatcactccacca

SEQ ID NO: 12842 - DNA, 36 bp, Artificial Sequence
  Synthetic oligonucleotide
gcagtgcagtcccacactatggtctctcgtttacaa

SEQ ID NO: 12843 - DNA, 38 bp, Artificial Sequence
  Synthetic oligonucleotide
gccaacgagcccattgcacaattaggagtcaccagtga

SEQ ID NO: 12844 - DNA, 35 bp, Artificial Sequence
  Synthetic oligonucleotide
gccaacgttagccgctactccaatcgcctctgaaa

SEQ ID NO: 12845 - DNA, 35 bp, Artificial Sequence
  Synthetic oligonucleotide
gccacacatgacagtgcgcatccgttagaagtaaa

SEQ ID NO: 12846 - DNA, 36 bp, Artificial Sequence
  Synthetic oligonucleotide
gccacacgcaatgtggataagagtacgtattccgta

SEQ ID NO: 12847 - DNA, 35 bp, Artificial Sequence
  Synthetic oligonucleotide
gccagtccggacgtcatgagcgcatggttgtctct

SEQ ID NO: 12848 - DNA, 36 bp, Artificial Sequence
  Synthetic oligonucleotide
gccagtggggcgaaaaccgtaggacgagaatcggga

SEQ ID NO: 12849 - DNA, 37 bp, Artificial Sequence
  Synthetic oligonucleotide
gcccaacacatgtggtattgccagcaaatctggccga

SEQ ID NO: 12850 - DNA, 35 bp, Artificial Sequence
  Synthetic oligonucleotide
gccgagtcagggcacactcgtcatcaagtggggta

SEQ ID NO: 12851 - DNA, 37 bp, Artificial Sequence
  Synthetic oligonucleotide
ggacacaccaggttctaacacgttttctgtacacgga

SEQ ID NO: 12852 - DNA, 37 bp, Artificial Sequence
  Synthetic oligonucleotide
ggacccggtcaaagatttagacgccatggtcaaggga

SEQ ID NO: 12853 - DNA, 38 bp, Artificial Sequence
  Synthetic oligonucleotide
gtaccagtgccactatgggttattggtagacatggtga

SEQ ID NO: 12854 - DNA, 35 bp, Artificial Sequence
  Synthetic oligonucleotide
gtcgaccaacatgttgcagactccttagtatcact

SEQ ID NO: 12855 - DNA, 35 bp, Artificial Sequence
  Synthetic oligonucleotide
gtcgccaaggagtcgatccccagactgctagcatg

SEQ ID NO: 12856 - DNA, 35 bp, Artificial Sequence
  Synthetic oligonucleotide
gtgaacgcacagccggtttgagcgactatcaactc

SEQ ID NO: 12857 - DNA, 37 bp, Artificial Sequence
  Synthetic oligonucleotide
gtgccaacacgtcaagcccttcgtatcgtcacttgga

SEQ ID NO: 12858 - DNA, 35 bp, Artificial Sequence
  Synthetic oligonucleotide
gtgccgaaacattgcgggtacatgcaatctaacag

SEQ ID NO: 12859 - DNA, 37 bp, Artificial Sequence
  Synthetic oligonucleotide
taacccgctgcccatgaagttagtaaaacgatgttga

SEQ ID NO: 12860 - DNA, 35 bp, Artificial Sequence
  Synthetic oligonucleotide
taagtgcagagccgctcactgtacacatagcaaag

SEQ ID NO: 12861 - DNA, 33 bp, Artificial Sequence
  Synthetic oligonucleotide
tacacaccgctggaaactgcgcacgatttggtt

SEQ ID NO: 12862 - DNA, 37 bp, Artificial Sequence
  Synthetic oligonucleotide
tacgcaggacaaaaaagcagatcagtttgaggtcgga

SEQ ID NO: 12863 - DNA, 37 bp, Artificial Sequence
  Synthetic oligonucleotide
tacgggacaggacttacgcacaagagagtctctagga

SEQ ID NO: 12864 - DNA, 34 bp, Artificial Sequence
  Synthetic oligonucleotide
tacgtgctgcaggccaagattcggccacccatac

SEQ ID NO: 12865 - DNA, 37 bp, Artificial Sequence
  Synthetic oligonucleotide
tatgccccaggtcccacatagttgtcatttccaggga

SEQ ID NO: 12866 - DNA, 35 bp, Artificial Sequence
  Synthetic oligonucleotide
tcacgcaggcatcactgtcgcatatctccgttgag

SEQ ID NO: 12867 - DNA, 36 bp, Artificial Sequence
  Synthetic oligonucleotide
tcacgccggggagatcggtcccaacagttcacggta

SEQ ID NO: 12868 - DNA, 36 bp, Artificial Sequence
  Synthetic oligonucleotide
tcacgcctacggagcggacaagccttctttctgtca

SEQ ID NO: 12869 - DNA, 38 bp, Artificial Sequence
  Synthetic oligonucleotide
tcagggaggtcggtggggatcgcggtggctggccctga

SEQ ID NO: 12870 - DNA, 37 bp, Artificial Sequence
  Synthetic oligonucleotide
tcatccagcaacgtgaattgagagaacctcagcctga

SEQ ID NO: 12871 - DNA, 37 bp, Artificial Sequence
  Synthetic oligonucleotide
tccgaagccgtaaggatggatggagaagccaggatga

SEQ ID NO: 12872 - DNA, 36 bp, Artificial Sequence
  Synthetic oligonucleotide
tgaaacgagcggaatgaaggtaggatccacgctgca

SEQ ID NO: 12873 - DNA, 38 bp, Artificial Sequence
  Synthetic oligonucleotide
tgaccgatcgcggtctgtcaaatctaaccaccaattga

SEQ ID NO: 12874 - DNA, 35 bp, Artificial Sequence
  Synthetic oligonucleotide
tgacgacgcgcccacgcctgaaggtcagcctatcc

SEQ ID NO: 12875 - DNA, 35 bp, Artificial Sequence
  Synthetic oligonucleotide
tgttattgccacactgaccctgcctaacggaaacc

SEQ ID NO: 12876 - DNA, 38 bp, Artificial Sequence
  Synthetic oligonucleotide
ttgaaggccgtgaggatgggtgttaacgttccctttga

SEQ ID NO: 12877 - DNA, 35 bp, Artificial Sequence
  Synthetic oligonucleotide
ttgcaaccggaggtcgtgtcgttttagacctgtcg

SEQ ID NO: 12878 - DNA, 36 bp, Artificial Sequence
  Synthetic oligonucleotide
aacgacccatcgtgaagtcttactgacaggcaagga

SEQ ID NO: 12879 - DNA, 37 bp, Artificial Sequence
  Synthetic oligonucleotide
aacgagccaccatccgcaccctgggagtagttatgga

SEQ ID NO: 12880 - DNA, 37 bp, Artificial Sequence
  Synthetic oligonucleotide
aacgccctgctaggcaaagtacaattgaacaggccga

SEQ ID NO: 12881 - DNA, 37 bp, Artificial Sequence
  Synthetic oligonucleotide
acacgacgaaggccacgactgtgaatagggattctga

SEQ ID NO: 12882 - DNA, 35 bp, Artificial Sequence
  Synthetic oligonucleotide
acacgcgtggtgcactgcggatacgtactatcgac

SEQ ID NO: 12883 - DNA, 35 bp, Artificial Sequence
  Synthetic oligonucleotide
acatacaccggtcgccatgtcgaagtacctaaatc

SEQ ID NO: 12884 - DNA, 36 bp, Artificial Sequence
  Synthetic oligonucleotide
accacgaacagcatgcgagtacaaggaaggccagta

SEQ ID NO: 12885 - DNA, 38 bp, Artificial Sequence
  Synthetic oligonucleotide
acccatcgcgagctgtatccatgggccgagtttattga

SEQ ID NO: 12886 - DNA, 36 bp, Artificial Sequence
  Synthetic oligonucleotide
accgacccgcccttacgtactcagcatccactgcga

SEQ ID NO: 12887 - DNA, 36 bp, Artificial Sequence
  Synthetic oligonucleotide
agccacatgcgccaaaacacgcaggaagttcctgta

SEQ ID NO: 12888 - DNA, 35 bp, Artificial Sequence
  Synthetic oligonucleotide
atccaccgccgcttaggtgccgtactcagcattat

SEQ ID NO: 12889 - DNA, 35 bp, Artificial Sequence
  Synthetic oligonucleotide
atcgaccgcagactcgtcgctctcacccagcagtg

SEQ ID NO: 12890 - DNA, 36 bp, Artificial Sequence
  Synthetic oligonucleotide
atcgcggtagagcggtccggtcttgtgtttgctcca

SEQ ID NO: 12891 - DNA, 36 bp, Artificial Sequence
  Synthetic oligonucleotide
atgacgcgcaacaacctggctaagccaccgacgaca

SEQ ID NO: 12892 - DNA, 35 bp, Artificial Sequence
  Synthetic oligonucleotide
atgccgcctgaacgcccacgtttagagatactaca

SEQ ID NO: 12893 - DNA, 35 bp, Artificial Sequence
  Synthetic oligonucleotide
gaagcccgcaaccgtcgcacgacaaataggatgtt

SEQ ID NO: 12894 - DNA, 35 bp, Artificial Sequence
  Synthetic oligonucleotide
gacaccacactcgtggaacgcacagacgtaagcga

SEQ ID NO: 12895 - DNA, 38 bp, Artificial Sequence
  Synthetic oligonucleotide
gacacgtgtgccgcctacactcgtctccaggtggttga

SEQ ID NO: 12896 - DNA, 35 bp, Artificial Sequence
  Synthetic oligonucleotide
gacactcgcaaatcgccaagtacactgatgcacgt

SEQ ID NO: 12897 - DNA, 37 bp, Artificial Sequence
  Synthetic oligonucleotide
gacatgccccaactgtactcaacaatcgttcaggcga

SEQ ID NO: 12898 - DNA, 36 bp, Artificial Sequence
  Synthetic oligonucleotide
gaccagagcgcgagtgtttggtccgtgctgctggaa

SEQ ID NO: 12899 - DNA, 36 bp, Artificial Sequence
  Synthetic oligonucleotide
gaccgacatgcgtaaggggcctagacagtggtttaa

SEQ ID NO: 12900 - DNA, 37 bp, Artificial Sequence
  Synthetic oligonucleotide
gacgacgctggcgtgatcccaagtaactagcacagga

SEQ ID NO: 12901 - DNA, 37 bp, Artificial Sequence
  Synthetic oligonucleotide
gacgagtgccaccttgtgatgttccttacagtctaga

SEQ ID NO: 12902 - DNA, 38 bp, Artificial Sequence
  Synthetic oligonucleotide
gacggagcatctcgaagcaatgatggagggcacattga

SEQ ID NO: 12903 - DNA, 37 bp, Artificial Sequence
  Synthetic oligonucleotide
gacgggatcgaggtccgagatcaatacgtccacttga

SEQ ID NO: 12904 - DNA, 38 bp, Artificial Sequence
  Synthetic oligonucleotide
gagcacacacagaccggttcataatggagaacagttga

SEQ ID NO: 12905 - DNA, 35 bp, Artificial Sequence
  Synthetic oligonucleotide
gagccacgggcaagtggcgggagacagttatcgct

SEQ ID NO: 12906 - DNA, 36 bp, Artificial Sequence
  Synthetic oligonucleotide
gagtccaacgccgcaagccacctgtaagagccggta

SEQ ID NO: 12907 - DNA, 38 bp, Artificial Sequence
  Synthetic oligonucleotide
gatgactgcggcacggtttataaggtatttcggtgtga

SEQ ID NO: 12908 - DNA, 37 bp, Artificial Sequence
  Synthetic oligonucleotide
gcacaaccgatccgctagttcttagccacctgcttga

SEQ ID NO: 12909 - DNA, 38 bp, Artificial Sequence
  Synthetic oligonucleotide
gcacaactcccactgtgaacgaagaactggtatggtga

SEQ ID NO: 12910 - DNA, 36 bp, Artificial Sequence
  Synthetic oligonucleotide
gcaccaaagcacgtatgggacgtaacagtagccgaa

SEQ ID NO: 12911 - DNA, 36 bp, Artificial Sequence
  Synthetic oligonucleotide
gcaccagtcagggtgcgtggttgaccgttatgcgaa

SEQ ID NO: 12912 - DNA, 37 bp, Artificial Sequence
  Synthetic oligonucleotide
gcagtgcacggagcggtccgaccaatgctacacttga

SEQ ID NO: 12913 - DNA, 36 bp, Artificial Sequence
  Synthetic oligonucleotide
gcatagtcaagcaaggaaggtgagtcatctttccta

SEQ ID NO: 12914 - DNA, 35 bp, Artificial Sequence
  Synthetic oligonucleotide
gccacgacagttcgattacaagcagaagaagggcc

SEQ ID NO: 12915 - DNA, 35 bp, Artificial Sequence
  Synthetic oligonucleotide
gccacgcagtgtaccaaacaccacgctacgaacgt

SEQ ID NO: 12916 - DNA, 36 bp, Artificial Sequence
  Synthetic oligonucleotide
gccgacggcctttttttatcgcacaagggtagaaca

SEQ ID NO: 12917 - DNA, 38 bp, Artificial Sequence
  Synthetic oligonucleotide
gccggaaagtcaaagtattcagtgggtttgtacgttga

SEQ ID NO: 12918 - DNA, 37 bp, Artificial Sequence
  Synthetic oligonucleotide
gcgacccgcacagagagctgacgagtgcagtttagga

SEQ ID NO: 12919 - DNA, 36 bp, Artificial Sequence
  Synthetic oligonucleotide
ggacacacgccgctggtcatacacttgcgtaaacca

SEQ ID NO: 12920 - DNA, 35 bp, Artificial Sequence
  Synthetic oligonucleotide
ggggccgtacgaatggtatggtcatcacgataact

SEQ ID NO: 12921 - DNA, 35 bp, Artificial Sequence
  Synthetic oligonucleotide
ggtgccgcagtcaagagtacctcccctaggcatac

SEQ ID NO: 12922 - DNA, 36 bp, Artificial Sequence
  Synthetic oligonucleotide
gtacacgctacagctgatcgagagtcatgattagga

SEQ ID NO: 12923 - DNA, 37 bp, Artificial Sequence
  Synthetic oligonucleotide
gtccacccagcggttgcgtgccgtcacaggtaacgga

SEQ ID NO: 12924 - DNA, 35 bp, Artificial Sequence
  Synthetic oligonucleotide
gtcccgcgagccgtcgcttaccatccattttctac

SEQ ID NO: 12925 - DNA, 36 bp, Artificial Sequence
  Synthetic oligonucleotide
gtgcgacgtaggccgcagataagctgtctcacacta

SEQ ID NO: 12926 - DNA, 35 bp, Artificial Sequence
  Synthetic oligonucleotide
tacgcacacccgtcgtactgagggaggtgcatgac

SEQ ID NO: 12927 - DNA, 36 bp, Artificial Sequence
  Synthetic oligonucleotide
tacgcaccaacgctagtttaacgaaagcacatggta

SEQ ID NO: 12928 - DNA, 35 bp, Artificial Sequence
  Synthetic oligonucleotide
tactgccagaccgatcgacaacgcaagcacttggg

SEQ ID NO: 12929 - DNA, 35 bp, Artificial Sequence
  Synthetic oligonucleotide
tcaacggtgcacgacgtgtggtcggagaggttgac

SEQ ID NO: 12930 - DNA, 36 bp, Artificial Sequence
  Synthetic oligonucleotide
tcacaccgcctctgaaagaacattccttgcacgtaa

SEQ ID NO: 12931 - DNA, 38 bp, Artificial Sequence
  Synthetic oligonucleotide
tcacacgcgacgaaccggtgattgtaaggtagttgtga

SEQ ID NO: 12932 - DNA, 38 bp, Artificial Sequence
  Synthetic oligonucleotide
tcactgctgccgtaccttcctagccatagattggatga

SEQ ID NO: 12933 - DNA, 35 bp, Artificial Sequence
  Synthetic oligonucleotide
tccacgccccagtgtaactttgccatgacaatgcc

SEQ ID NO: 12934 - DNA, 38 bp, Artificial Sequence
  Synthetic oligonucleotide
tccactccactgaccccgacaaccggcgagctcggtga

SEQ ID NO: 12935 - DNA, 36 bp, Artificial Sequence
  Synthetic oligonucleotide
tcccacatccatagaaggactgcagactcatacgta

SEQ ID NO: 12936 - DNA, 38 bp, Artificial Sequence
  Synthetic oligonucleotide
tcgaaccacaggcgctggagcatcgtatcccttgctga

SEQ ID NO: 12937 - DNA, 35 bp, Artificial Sequence
  Synthetic oligonucleotide
tcgagacgaacagtcacagccggaagcatcgcacg

SEQ ID NO: 12938 - DNA, 35 bp, Artificial Sequence
  Synthetic oligonucleotide
tctaccggcacactggctagccccacatatcccta

SEQ ID NO: 12939 - DNA, 35 bp, Artificial Sequence
  Synthetic oligonucleotide
tgacgccacgaggtcgtaccactaagtccttctct

SEQ ID NO: 12940 - DNA, 35 bp, Artificial Sequence
  Synthetic oligonucleotide
tgagccgggcactcaggtttaagttggcacatcga

SEQ ID NO: 12941 - DNA, 36 bp, Artificial Sequence
  Synthetic oligonucleotide
tgatcgccaaacgaaggagttgcgtagtatgtggaa

SEQ ID NO: 12942 - DNA, 38 bp, Artificial Sequence
  Synthetic oligonucleotide
ttccacccccggtgtccaacgatcccacaacatgatga

SEQ ID NO: 12943 - DNA, 35 bp, Artificial Sequence
  Synthetic oligonucleotide
aacaaccgcgacacagataacgcaaacaacaaacg

SEQ ID NO: 12944 - DNA, 37 bp, Artificial Sequence
  Synthetic oligonucleotide
aaccaccgaccacacaggcgccacggaggttatggga

SEQ ID NO: 12945 - DNA, 37 bp, Artificial Sequence
  Synthetic oligonucleotide
aacgcccagatcacgacgaaacagtctccctagtaga

SEQ ID NO: 12946 - DNA, 35 bp, Artificial Sequence
  Synthetic oligonucleotide
aacgccgacagcccgatctacgtaggacggtgtta

SEQ ID NO: 12947 - DNA, 38 bp, Artificial Sequence
  Synthetic oligonucleotide
aatgtcgcaggtaagggactagagacgacccgtactga

SEQ ID NO: 12948 - DNA, 38 bp, Artificial Sequence
  Synthetic oligonucleotide
acacaccaaggacgaactgtttcatggacagacggtga

SEQ ID NO: 12949 - DNA, 36 bp, Artificial Sequence
  Synthetic oligonucleotide
acacacccagcttcacgaggcataggagggtcgtga

SEQ ID NO: 12950 - DNA, 36 bp, Artificial Sequence
  Synthetic oligonucleotide
acacacgcttgaacgcattgtctgaccttaggccta

SEQ ID NO: 12951 - DNA, 36 bp, Artificial Sequence
  Synthetic oligonucleotide
acaccagaccacacggtgcaagtggcattcaatgga

SEQ ID NO: 12952 - DNA, 36 bp, Artificial Sequence
  Synthetic oligonucleotide
acacccctccagtactgcatctacaaaatagcccca

SEQ ID NO: 12953 - DNA, 37 bp, Artificial Sequence
  Synthetic oligonucleotide
acacgcccagtgcttgttacatcttgcaggagcaaga

SEQ ID NO: 12954 - DNA, 37 bp, Artificial Sequence
  Synthetic oligonucleotide
accagtgccgatgctagggatggacgaggtctgggga

SEQ ID NO: 12955 - DNA, 36 bp, Artificial Sequence
  Synthetic oligonucleotide
acccccccgccacagtcccattgatatggtagcata

SEQ ID NO: 12956 - DNA, 34 bp, Artificial Sequence
  Synthetic oligonucleotide
agcaccacacgacgcccacgccacgaaaccagga

SEQ ID NO: 12957 - DNA, 35 bp, Artificial Sequence
  Synthetic oligonucleotide
atcaccacggtcaggtagtacaacctgcagtaagg

SEQ ID NO: 12958 - DNA, 37 bp, Artificial Sequence
  Synthetic oligonucleotide
atgcccagacaggcgttggtgggacctaatgctttga

SEQ ID NO: 12959 - DNA, 35 bp, Artificial Sequence
  Synthetic oligonucleotide
attgccgcaccttccatttcgatccacttgttccg

SEQ ID NO: 12960 - DNA, 38 bp, Artificial Sequence
  Synthetic oligonucleotide
gaaccgccagggtagacgaacgcaacgaaggtgattga

SEQ ID NO: 12961 - DNA, 36 bp, Artificial Sequence
  Synthetic oligonucleotide
gaatgcaacatccagaccccgcaccattcaaatcaa

SEQ ID NO: 12962 - DNA, 38 bp, Artificial Sequence
  Synthetic oligonucleotide
gacacactcgggactgtggaacaaaggcacatagttga

SEQ ID NO: 12963 - DNA, 38 bp, Artificial Sequence
  Synthetic oligonucleotide
gacaccaggcctagggcatcgagatcaattctggagga

SEQ ID NO: 12964 - DNA, 35 bp, Artificial Sequence
  Synthetic oligonucleotide
gacacggtcggttggtatgtagagtggttcacgta

SEQ ID NO: 12965 - DNA, 36 bp, Artificial Sequence
  Synthetic oligonucleotide
gacccagaacgtgcactatcagtcatggttatagca

SEQ ID NO: 12966 - DNA, 36 bp, Artificial Sequence
  Synthetic oligonucleotide
gaccgcaactagcccacggccggacagtccgctaaa

SEQ ID NO: 12967 - DNA, 35 bp, Artificial Sequence
  Synthetic oligonucleotide
gaccgcccaacccaactaacagccgcatacgtggc

SEQ ID NO: 12968 - DNA, 38 bp, Artificial Sequence
  Synthetic oligonucleotide
gacgacggatcacatgcactttcacaggaacatcatga

SEQ ID NO: 12969 - DNA, 38 bp, Artificial Sequence
  Synthetic oligonucleotide
gacgccgagcagggaactggtcgcttatcaaaacgtga

SEQ ID NO: 12970 - DNA, 37 bp, Artificial Sequence
  Synthetic oligonucleotide
gatcatcagtcatgcgcatagccttaccagggatgga

SEQ ID NO: 12971 - DNA, 35 bp, Artificial Sequence
  Synthetic oligonucleotide
gatgactgccactttgaacagaaaggcgcttaaga

SEQ ID NO: 12972 - DNA, 36 bp, Artificial Sequence
  Synthetic oligonucleotide
gatgatcccatccgtctgcttagagccttaccacca

SEQ ID NO: 12973 - DNA, 36 bp, Artificial Sequence
  Synthetic oligonucleotide
gatggaacgctcacgtacgtcggtgtgagactacta

SEQ ID NO: 12974 - DNA, 36 bp, Artificial Sequence
  Synthetic oligonucleotide
gatgtgcggaaactcgtcatgaacctaagctagaga

SEQ ID NO: 12975 - DNA, 37 bp, Artificial Sequence
  Synthetic oligonucleotide
gcaacgtgacgctcttatggaacggccacaagtagga

SEQ ID NO: 12976 - DNA, 35 bp, Artificial Sequence
  Synthetic oligonucleotide
gcacatactactcaggttacagagaactatcgcac

SEQ ID NO: 12977 - DNA, 38 bp, Artificial Sequence
  Synthetic oligonucleotide
gcatcaccggaatgtcacagaaacaggtacgcttgtga

SEQ ID NO: 12978 - DNA, 36 bp, Artificial Sequence
  Synthetic oligonucleotide
gcatcgctgaagtgaggcgcaccgatccgacaacga

SEQ ID NO: 12979 - DNA, 38 bp, Artificial Sequence
  Synthetic oligonucleotide
gcccacggcggagggggcacaaaagccgcactgtctga

SEQ ID NO: 12980 - DNA, 37 bp, Artificial Sequence
  Synthetic oligonucleotide
gccgaacgaagagcatacgatctccgagttattaaga

SEQ ID NO: 12981 - DNA, 38 bp, Artificial Sequence
  Synthetic oligonucleotide
gcgtacctcagcacactatcatcgctaagggaccatga

SEQ ID NO: 12982 - DNA, 36 bp, Artificial Sequence
  Synthetic oligonucleotide
gctgcaagacgcccgctctatccactcgtaatgaga

SEQ ID NO: 12983 - DNA, 37 bp, Artificial Sequence
  Synthetic oligonucleotide
gctgcagtgccggatcgacttgtgatagtacggttga

SEQ ID NO: 12984 - DNA, 37 bp, Artificial Sequence
  Synthetic oligonucleotide
gctgcctgggtgcacatgtatgcgtatcaagttggga

SEQ ID NO: 12985 - DNA, 38 bp, Artificial Sequence
  Synthetic oligonucleotide
gctggacaccagtaggctgtagatgtatcgatgcttga

SEQ ID NO: 12986 - DNA, 35 bp, Artificial Sequence
  Synthetic oligonucleotide
ggatgcaccactgaagtgatttaggatcctatgac

SEQ ID NO: 12987 - DNA, 36 bp, Artificial Sequence
  Synthetic oligonucleotide
gtacccgaccggtctcagtccataattttaccccca

SEQ ID NO: 12988 - DNA, 35 bp, Artificial Sequence
  Synthetic oligonucleotide
gtcaaccgtgcgatggtggctagtaggtgttaacc

SEQ ID NO: 12989 - DNA, 38 bp, Artificial Sequence
  Synthetic oligonucleotide
gtgaacgccacagtgtacgctgttcatgtagtaaatga

SEQ ID NO: 12990 - DNA, 35 bp, Artificial Sequence
  Synthetic oligonucleotide
gtgccacgccattcatccctgtgacgccccgtttc

SEQ ID NO: 12991 - DNA, 36 bp, Artificial Sequence
  Synthetic oligonucleotide
gtgctcgcagtaaggacccgaaacgaccatcggcca

SEQ ID NO: 12992 - DNA, 37 bp, Artificial Sequence
  Synthetic oligonucleotide
tacatccgggtcaggatatcgtgacgtaagaacttga

SEQ ID NO: 12993 - DNA, 38 bp, Artificial Sequence
  Synthetic oligonucleotide
tacgacatcccacggagaggatagttatgtcacgttga

SEQ ID NO: 12994 - DNA, 35 bp, Artificial Sequence
  Synthetic oligonucleotide
tacgacgcagacaaagcataacgttataggccttt

SEQ ID NO: 12995 - DNA, 35 bp, Artificial Sequence
  Synthetic oligonucleotide
tacgcacgacagatatgctttcgaacatccaggca

SEQ ID NO: 12996 - DNA, 38 bp, Artificial Sequence
  Synthetic oligonucleotide
tacgcactcgggggattagagttcgtcaattatcgtga

SEQ ID NO: 12997 - DNA, 35 bp, Artificial Sequence
  Synthetic oligonucleotide
tagccgccaacgcttttttcgacggacgaataggc

SEQ ID NO: 12998 - DNA, 37 bp, Artificial Sequence
  Synthetic oligonucleotide
tcaaacgcatggggccaagtgtttgggtcaatcatga

SEQ ID NO: 12999 - DNA, 38 bp, Artificial Sequence
  Synthetic oligonucleotide
tcaacacgaactgcacgtgacatagagggcactcctga

SEQ ID NO: 13000 - DNA, 37 bp, Artificial Sequence
  Synthetic oligonucleotide
tcacccagccaccacaagtagctttgagcaagtatga

SEQ ID NO: 13001 - DNA, 35 bp, Artificial Sequence
  Synthetic oligonucleotide
tcacgaggcaagctgtcaagcatacccaacaataa

SEQ ID NO: 13002 - DNA, 37 bp, Artificial Sequence
  Synthetic oligonucleotide
tcacgcggacgaaaaagcgtgagacatgagggatcga

SEQ ID NO: 13003 - DNA, 38 bp, Artificial Sequence
  Synthetic oligonucleotide
tcactgcagacgtttcactgtagggggacgtattctga

SEQ ID NO: 13004 - DNA, 35 bp, Artificial Sequence
  Synthetic oligonucleotide
tcagccggcaatggtctgtctccagggtgggacac

SEQ ID NO: 13005 - DNA, 35 bp, Artificial Sequence
  Synthetic oligonucleotide
tccacaacgcaggaggttccgacagtagcttatcc

SEQ ID NO: 13006 - DNA, 36 bp, Artificial Sequence
  Synthetic oligonucleotide
tgacccggaagttattatgagacaagcggggaaaga

SEQ ID NO: 13007 - DNA, 36 bp, Artificial Sequence
  Synthetic oligonucleotide
tgcgagggagcacgtggtatcaaaagcgtgaatgca

SEQ ID NO: 13008 - DNA, 35 bp, Artificial Sequence
  Synthetic oligonucleotide
tgcggacgcacacggatacaggaaggaaatccagt

SEQ ID NO: 13009 - DNA, 36 bp, Artificial Sequence
  Synthetic oligonucleotide
ttgcactcgcaaccaagaggggataggtcatccgca

SEQ ID NO: 13010 - DNA, 35 bp, Artificial Sequence
  Synthetic oligonucleotide
aacgaaggcacgggagagatcgggtaaaagactgg

SEQ ID NO: 13011 - DNA, 35 bp, Artificial Sequence
  Synthetic oligonucleotide
aacgcccgcaaagggttgagtgctggttaagtcct

SEQ ID NO: 13012 - DNA, 35 bp, Artificial Sequence
  Synthetic oligonucleotide
aacgcccgtgcagtcggattcagaaggcgaggttt

SEQ ID NO: 13013 - DNA, 37 bp, Artificial Sequence
  Synthetic oligonucleotide
aacgcgagagctgggggttcatgtccgtaacgtaaga

SEQ ID NO: 13014 - DNA, 36 bp, Artificial Sequence
  Synthetic oligonucleotide
aatgccgcaccggttacgtacacagtcggttaggta

SEQ ID NO: 13015 - DNA, 35 bp, Artificial Sequence
  Synthetic oligonucleotide
acacacacgcacgaccatttgctagcagggggacc

SEQ ID NO: 13016 - DNA, 38 bp, Artificial Sequence
  Synthetic oligonucleotide
acaccacgcacctcggtctatgattgccttgggagtga

SEQ ID NO: 13017 - DNA, 37 bp, Artificial Sequence
  Synthetic oligonucleotide
acaccccatccttgcttagcgaagctcgtgccgacga

SEQ ID NO: 13018 - DNA, 37 bp, Artificial Sequence
  Synthetic oligonucleotide
acaccgaggcacgtacaaatgctaaaccttagacgga

SEQ ID NO: 13019 - DNA, 35 bp, Artificial Sequence
  Synthetic oligonucleotide
acactgcgattggtacgacttcgctcgatattttc

SEQ ID NO: 13020 - DNA, 35 bp, Artificial Sequence
  Synthetic oligonucleotide
acagcccagaagtgccgagtaatcggacggttcac

SEQ ID NO: 13021 - DNA, 35 bp, Artificial Sequence
  Synthetic oligonucleotide
acatgacgagcgccggagtccatcttaagtcagtg

SEQ ID NO: 13022 - DNA, 38 bp, Artificial Sequence
  Synthetic oligonucleotide
acccgtgcaagcggtggcaaaagggcttggcttggtga

SEQ ID NO: 13023 - DNA, 37 bp, Artificial Sequence
  Synthetic oligonucleotide
acgcaccacatctggggatgtaaagtggcgaacgaga

SEQ ID NO: 13024 - DNA, 35 bp, Artificial Sequence
  Synthetic oligonucleotide
agcacaccccccactcgctgcaatcagggtacact

SEQ ID NO: 13025 - DNA, 37 bp, Artificial Sequence
  Synthetic oligonucleotide
agcgacgtaagtccatgtactctcaccacatcttcga

SEQ ID NO: 13026 - DNA, 35 bp, Artificial Sequence
  Synthetic oligonucleotide
agcggacgtacagacgcgcgtttcctgtgacgtga

SEQ ID NO: 13027 - DNA, 36 bp, Artificial Sequence
  Synthetic oligonucleotide
atgcgctgaccgtatcgtgcattggtgagctcatga

SEQ ID NO: 13028 - DNA, 38 bp, Artificial Sequence
  Synthetic oligonucleotide
atgtacgcagagaaggcatgaccgacgtttaggggtga

SEQ ID NO: 13029 - DNA, 35 bp, Artificial Sequence
  Synthetic oligonucleotide
gaacacgggccgactgtgttccacgagacgcgtta

SEQ ID NO: 13030 - DNA, 36 bp, Artificial Sequence
  Synthetic oligonucleotide
gaacaggcaacgcgctagggcatcacttagggacta

SEQ ID NO: 13031 - DNA, 38 bp, Artificial Sequence
  Synthetic oligonucleotide
gaacatgccaaagcgcaatcctggtgctgccagcatga

SEQ ID NO: 13032 - DNA, 35 bp, Artificial Sequence
  Synthetic oligonucleotide
gaaccccccaacctaaaatacgtcactgtttgagt

SEQ ID NO: 13033 - DNA, 38 bp, Artificial Sequence
  Synthetic oligonucleotide
gaacgcacatgaggggtgtgtagatgttcgcacaatga

SEQ ID NO: 13034 - DNA, 36 bp, Artificial Sequence
  Synthetic oligonucleotide
gacaacgcccaagtaaagtaccgttggacatgcgaa

SEQ ID NO: 13035 - DNA, 35 bp, Artificial Sequence
  Synthetic oligonucleotide
gacaacgcgaggtggtatgtactatccgttatagt

SEQ ID NO: 13036 - DNA, 36 bp, Artificial Sequence
  Synthetic oligonucleotide
gacaccaccgccagtcccccatttcgcgccgagaga

SEQ ID NO: 13037 - DNA, 35 bp, Artificial Sequence
  Synthetic oligonucleotide
gacacggactgaagtgtgaggcgaagagggtcctc

SEQ ID NO: 13038 - DNA, 34 bp, Artificial Sequence
  Synthetic oligonucleotide
gacatcagccgacccacagttccaacatcagtca

SEQ ID NO: 13039 - DNA, 35 bp, Artificial Sequence
  Synthetic oligonucleotide
gacgaccaccaggccatgcgttagacctgcacaaa

SEQ ID NO: 13040 - DNA, 35 bp, Artificial Sequence
  Synthetic oligonucleotide
gacgtccagtcacgaggccgttagaatcattcagt

SEQ ID NO: 13041 - DNA, 36 bp, Artificial Sequence
  Synthetic oligonucleotide
gactcgcatcatgaaactctgtccccaacttatcaa

SEQ ID NO: 13042 - DNA, 38 bp, Artificial Sequence
  Synthetic oligonucleotide
gagacgccacacggtatgcaactcgcacctgtccttga

SEQ ID NO: 13043 - DNA, 34 bp, Artificial Sequence
  Synthetic oligonucleotide
gagcgccgcgaacgtagcatagggctcagatgac

SEQ ID NO: 13044 - DNA, 35 bp, Artificial Sequence
  Synthetic oligonucleotide
gagtgcccagtacacgactaacagccacatcttca

SEQ ID NO: 13045 - DNA, 37 bp, Artificial Sequence
  Synthetic oligonucleotide
gagtgcgcaggggttaatgcggttggaggacggagga

SEQ ID NO: 13046 - DNA, 37 bp, Artificial Sequence
  Synthetic oligonucleotide
gatccaaccgcagaggggacacgaccacgtcagcaga

SEQ ID NO: 13047 - DNA, 36 bp, Artificial Sequence
  Synthetic oligonucleotide
gatgacaaccgctaatctgccatatggactcggaca

SEQ ID NO: 13048 - DNA, 36 bp, Artificial Sequence
  Synthetic oligonucleotide
gatgcccacaacccctatgacttggtgtagatatta

SEQ ID NO: 13049 - DNA, 35 bp, Artificial Sequence
  Synthetic oligonucleotide
gcacatcgccccaagttcctgtctcgtactctttt

SEQ ID NO: 13050 - DNA, 34 bp, Artificial Sequence
  Synthetic oligonucleotide
gcacccgcacgacagatttccgccaaaaataagt

SEQ ID NO: 13051 - DNA, 36 bp, Artificial Sequence
  Synthetic oligonucleotide
gccaacatcacgcctacaaaaaccgctctgccagga

SEQ ID NO: 13052 - DNA, 35 bp, Artificial Sequence
  Synthetic oligonucleotide
gccaacggatacgttgcatatcgattcgacccgtt

SEQ ID NO: 13053 - DNA, 38 bp, Artificial Sequence
  Synthetic oligonucleotide
gccccgacacactcctcacgcacagtcacgtttattga

SEQ ID NO: 13054 - DNA, 35 bp, Artificial Sequence
  Synthetic oligonucleotide
gccgcatccaagcaagaagtctccttcttctatcg

SEQ ID NO: 13055 - DNA, 37 bp, Artificial Sequence
  Synthetic oligonucleotide
gcgagaacgccgatctataactaggttcctccattga

SEQ ID NO: 13056 - DNA, 36 bp, Artificial Sequence
  Synthetic oligonucleotide
gcgccccaccgttgaaaggatatagtcgagctagca

SEQ ID NO: 13057 - DNA, 38 bp, Artificial Sequence
  Synthetic oligonucleotide
gctacgccaccaaaatttcccactacacggatacgtga

SEQ ID NO: 13058 - DNA, 35 bp, Artificial Sequence
  Synthetic oligonucleotide
gggacaagggccatgtagtaaaatgttttaacatg

SEQ ID NO: 13059 - DNA, 35 bp, Artificial Sequence
  Synthetic oligonucleotide
ggtcacggagacagggatataatagacataacaga

SEQ ID NO: 13060 - DNA, 38 bp, Artificial Sequence
  Synthetic oligonucleotide
ggtgcacagcattgagccaggtacacgttcactattga

SEQ ID NO: 13061 - DNA, 35 bp, Artificial Sequence
  Synthetic oligonucleotide
gtagcatgcaaccgatctagcaacaccgtacactg

SEQ ID NO: 13062 - DNA, 35 bp, Artificial Sequence
  Synthetic oligonucleotide
gtcagggcaacaggagtatcaacgtcattaagcat

SEQ ID NO: 13063 - DNA, 36 bp, Artificial Sequence
  Synthetic oligonucleotide
gtgacaagggcataggtgtgattggcgcaagaagta

SEQ ID NO: 13064 - DNA, 37 bp, Artificial Sequence
  Synthetic oligonucleotide
taagtgcgggcccgtttgtagtcttagccgtaattga

SEQ ID NO: 13065 - DNA, 36 bp, Artificial Sequence
  Synthetic oligonucleotide
tacaacccgccgcgctgtcctatgctagccaattca

SEQ ID NO: 13066 - DNA, 38 bp, Artificial Sequence
  Synthetic oligonucleotide
tacaccaccggtactggaagacatcgtaatgagcttga

SEQ ID NO: 13067 - DNA, 36 bp, Artificial Sequence
  Synthetic oligonucleotide
tagacgtgcccgaccgagtggaatgcgcttgtagta

SEQ ID NO: 13068 - DNA, 36 bp, Artificial Sequence
  Synthetic oligonucleotide
tatgcagaggccgagctttcactgaccccgctacaa

SEQ ID NO: 13069 - DNA, 37 bp, Artificial Sequence
  Synthetic oligonucleotide
tcaaccaccgtctggcatttgatgggaactcttgtga

SEQ ID NO: 13070 - DNA, 36 bp, Artificial Sequence
  Synthetic oligonucleotide
tcaaccatcccgcgatgttcccaaacgagcattccg

SEQ ID NO: 13071 - DNA, 37 bp, Artificial Sequence
  Synthetic oligonucleotide
tcacaaaccagatccctttcagtgcggaatttgctga

SEQ ID NO: 13072 - DNA, 35 bp, Artificial Sequence
  Synthetic oligonucleotide
tcacaccgggtctgcttgaagcctgatcgccttgc

SEQ ID NO: 13073 - DNA, 38 bp, Artificial Sequence
  Synthetic oligonucleotide
tcacgaacgaaggtaagtgttatgctacatcatgctga

SEQ ID NO: 13074 - DNA, 38 bp, Artificial Sequence
  Synthetic oligonucleotide
tccacaccggcggagattgaaagcaggccaggacatga

SEQ ID NO: 13075 - DNA, 35 bp, Artificial Sequence
  Synthetic oligonucleotide
tcccaagcacacgataggggtcatgcgttacttca

SEQ ID NO: 13076 - DNA, 38 bp, Artificial Sequence
  Synthetic oligonucleotide
tcccgccccacttcacagttccaagagccactcaatga

SEQ ID NO: 13077 - DNA, 37 bp, Artificial Sequence
  Synthetic oligonucleotide
tgcaacactgaccccgattaaactggatctatcgaga

SEQ ID NO: 13078 - DNA, 38 bp, Artificial Sequence
  Synthetic oligonucleotide
tgtgctggaccatgttctacagtttggcgagagcttga

SEQ ID NO: 13079 - DNA, 38 bp, Artificial Sequence
  Synthetic oligonucleotide
ttgcgggacgcaaatgtgctgcgttatagagcaactga

SEQ ID NO: 13080 - DNA, 37 bp, Artificial Sequence
  Synthetic oligonucleotide
ttgctgcacaagccgaggaatgtaacctcagggagga

SEQ ID NO: 13081 - DNA, 35 bp, Artificial Sequence
  Synthetic oligonucleotide
aacacacaccgtcgaacgtaattgcatgagaccca

SEQ ID NO: 13082 - DNA, 38 bp, Artificial Sequence
  Synthetic oligonucleotide
aaccaccgagcctcagacggaagggcagactcgcatga

SEQ ID NO: 13083 - DNA, 36 bp, Artificial Sequence
  Synthetic oligonucleotide
aacgcacacggctggttgtatagaacggttggagta

SEQ ID NO: 13084 - DNA, 35 bp, Artificial Sequence
  Synthetic oligonucleotide
acacaccggagtgttctctgtgtaccgtgcttggc

SEQ ID NO: 13085 - DNA, 36 bp, Artificial Sequence
  Synthetic oligonucleotide
acaccacgacgataaagttggagccatgtttgtggt

SEQ ID NO: 13086 - DNA, 38 bp, Artificial Sequence
  Synthetic oligonucleotide
acaccgcaaggtgctaagcagtcatgagaactacttga

SEQ ID NO: 13087 - DNA, 35 bp, Artificial Sequence
  Synthetic oligonucleotide
acacgagggggtgcattttgtataagcgccactgc

SEQ ID NO: 13088 - DNA, 38 bp, Artificial Sequence
  Synthetic oligonucleotide
acacgcgcacgtgcacatggttcctataaacgttatga

SEQ ID NO: 13089 - DNA, 35 bp, Artificial Sequence
  Synthetic oligonucleotide
acactgcacgccaaaaaatcatttcgttagacgcc

SEQ ID NO: 13090 - DNA, 37 bp, Artificial Sequence
  Synthetic oligonucleotide
accacaggactactcgtgctaagtaattgtcagtaga

SEQ ID NO: 13091 - DNA, 35 bp, Artificial Sequence
  Synthetic oligonucleotide
acccacgtcggggcaggaaactagattgttaattc

SEQ ID NO: 13092 - DNA, 35 bp, Artificial Sequence
  Synthetic oligonucleotide
acgcactacgggcggttaacttgggcgtgctgctc

SEQ ID NO: 13093 - DNA, 37 bp, Artificial Sequence
  Synthetic oligonucleotide
agacgagcaccggttgaaaaagggtctgttccggtga

SEQ ID NO: 13094 - DNA, 35 bp, Artificial Sequence
  Synthetic oligonucleotide
agtgccaggtccgcccattctgtgtactcatgctc

SEQ ID NO: 13095 - DNA, 36 bp, Artificial Sequence
  Synthetic oligonucleotide
attgcaacaagagcgagaaactgctggcgtatagta

SEQ ID NO: 13096 - DNA, 36 bp, Artificial Sequence
  Synthetic oligonucleotide
cacgcctatacgctagtgcactgccattagtggcaa

SEQ ID NO: 13097 - DNA, 35 bp, Artificial Sequence
  Synthetic oligonucleotide
gaagcgcagggaggcaattactttggacgctaact

SEQ ID NO: 13098 - DNA, 37 bp, Artificial Sequence
  Synthetic oligonucleotide
gacacaagctggtctaagttccacgactaagggagta

SEQ ID NO: 13099 - DNA, 35 bp, Artificial Sequence
  Synthetic oligonucleotide
gacacgcaacgtatcagggacaaatatagtcaccg

SEQ ID NO: 13100 - DNA, 38 bp, Artificial Sequence
  Synthetic oligonucleotide
gacacgcagtaattcggggggaagaggtatcaaggtga

SEQ ID NO: 13101 - DNA, 36 bp, Artificial Sequence
  Synthetic oligonucleotide
gacacggggcatgtttgaggacaaaggcaggagcaa

SEQ ID NO: 13102 - DNA, 36 bp, Artificial Sequence
  Synthetic oligonucleotide
gacccacacccgccaacgtccacgagactggggtca

SEQ ID NO: 13103 - DNA, 38 bp, Artificial Sequence
  Synthetic oligonucleotide
gaccgcaggcccatgatcgtggcttgagtgcgtggtga

SEQ ID NO: 13104 - DNA, 38 bp, Artificial Sequence
  Synthetic oligonucleotide
gacgcaccgtgcgatgccctatgcaacgcagttcttga

SEQ ID NO: 13105 - DNA, 36 bp, Artificial Sequence
  Synthetic oligonucleotide
gacgccacctcaccctttcattgagcactaccctta

SEQ ID NO: 13106 - DNA, 35 bp, Artificial Sequence
  Synthetic oligonucleotide
gacgccatatcagaggcgtgctttgacgagaacag

SEQ ID NO: 13107 - DNA, 35 bp, Artificial Sequence
  Synthetic oligonucleotide
gacgccgtgcagtgtacccaatggtgtggtcttgt

SEQ ID NO: 13108 - DNA, 37 bp, Artificial Sequence
  Synthetic oligonucleotide
gacgcggtggtgacggtatgcgacgacgtattggtga

SEQ ID NO: 13109 - DNA, 38 bp, Artificial Sequence
  Synthetic oligonucleotide
gacgtggctacgtagattcgatgccttcttttaactga

SEQ ID NO: 13110 - DNA, 36 bp, Artificial Sequence
  Synthetic oligonucleotide
gactacgaacacgaacatggaggtttgcctgaaaga

SEQ ID NO: 13111 - DNA, 38 bp, Artificial Sequence
  Synthetic oligonucleotide
gactcgctgagtatcgaagtgtccctgattcagcatga

SEQ ID NO: 13112 - DNA, 36 bp, Artificial Sequence
  Synthetic oligonucleotide
gactcgtgagaggtgtgcaagacaggttgatcagga

SEQ ID NO: 13113 - DNA, 35 bp, Artificial Sequence
  Synthetic oligonucleotide
gactgccggggggacgtgaaatctccattgtgttg

SEQ ID NO: 13114 - DNA, 37 bp, Artificial Sequence
  Synthetic oligonucleotide
gagacgcaaccgcagaagaagtttaaggtaaagctga

SEQ ID NO: 13115 - DNA, 38 bp, Artificial Sequence
  Synthetic oligonucleotide
gagactcgcagtacgatgaagacagttttccaccttga

SEQ ID NO: 13116 - DNA, 38 bp, Artificial Sequence
  Synthetic oligonucleotide
gagcgaatgcgaaccacacgtattggatccaagcatga

SEQ ID NO: 13117 - DNA, 35 bp, Artificial Sequence
  Synthetic oligonucleotide
gagcgcacgttgggacgatactaggcggttctgca

SEQ ID NO: 13118 - DNA, 36 bp, Artificial Sequence
  Synthetic oligonucleotide
gagctgctggcactgcaagaagtctctggtaagcta

SEQ ID NO: 13119 - DNA, 36 bp, Artificial Sequence
  Synthetic oligonucleotide
gatccgcctactaacgcaggaaacggtacaccatga

SEQ ID NO: 13120 - DNA, 35 bp, Artificial Sequence
  Synthetic oligonucleotide
gatgtcggatagccactcgctgattagactccaag

SEQ ID NO: 13121 - DNA, 38 bp, Artificial Sequence
  Synthetic oligonucleotide
gcacacatccgtggtgaacaagaataagccgccagtga

SEQ ID NO: 13122 - DNA, 35 bp, Artificial Sequence
  Synthetic oligonucleotide
gcaccgcgagagttcctattgcccttatccccact

SEQ ID NO: 13123 - DNA, 38 bp, Artificial Sequence
  Synthetic oligonucleotide
gcacgacgagggttaacaagacgtctggggaacggtga

SEQ ID NO: 13124 - DNA, 36 bp, Artificial Sequence
  Synthetic oligonucleotide
gcacggtactctgcattcgtctcattagttgttaca

SEQ ID NO: 13125 - DNA, 38 bp, Artificial Sequence
  Synthetic oligonucleotide
gcacgtgcagtcgttccatagttccgagcacgatgtga

SEQ ID NO: 13126 - DNA, 35 bp, Artificial Sequence
  Synthetic oligonucleotide
gcatacccgtgtcccaacatcttcactactcatat

SEQ ID NO: 13127 - DNA, 35 bp, Artificial Sequence
  Synthetic oligonucleotide
gccaaaggccgcagaagatgctgtccaactctacc

SEQ ID NO: 13128 - DNA, 37 bp, Artificial Sequence
  Synthetic oligonucleotide
gccaacatccgggagagcaaagagtaacagcatacga

SEQ ID NO: 13129 - DNA, 36 bp, Artificial Sequence
  Synthetic oligonucleotide
gccactcacagctttgtaatatgtactgtctaggca

SEQ ID NO: 13130 - DNA, 37 bp, Artificial Sequence
  Synthetic oligonucleotide
gcccaacctcatagcgaaacagagaatactgggaaga

SEQ ID NO: 13131 - DNA, 35 bp, Artificial Sequence
  Synthetic oligonucleotide
gcccccacacagaccccgcataacacaaaacgacg

SEQ ID NO: 13132 - DNA, 35 bp, Artificial Sequence
  Synthetic oligonucleotide
gccctgccgcctactatctactgaccccgcaatcc

SEQ ID NO: 13133 - DNA, 38 bp, Artificial Sequence
  Synthetic oligonucleotide
gccgtgcagaaggcgctaagctaagctcaccccagtga

SEQ ID NO: 13134 - DNA, 36 bp, Artificial Sequence
  Synthetic oligonucleotide
gcgacccgcacgatccgtgtagctgtactcatgaga

SEQ ID NO: 13135 - DNA, 36 bp, Artificial Sequence
  Synthetic oligonucleotide
gtatgccgcagatgggggcggaaaaacgtatggcaa

SEQ ID NO: 13136 - DNA, 35 bp, Artificial Sequence
  Synthetic oligonucleotide
gtcacatcggaccggcacataagcctgttgaagta

SEQ ID NO: 13137 - DNA, 36 bp, Artificial Sequence
  Synthetic oligonucleotide
gtcaccggggggggtccttcttaactgtcgaattca

SEQ ID NO: 13138 - DNA, 35 bp, Artificial Sequence
  Synthetic oligonucleotide
gtgaaccgacaatcgaagcgaagaccgcctatggg

SEQ ID NO: 13139 - DNA, 37 bp, Artificial Sequence
  Synthetic oligonucleotide
gtgacccgcgagtgttgccagcagttcacatcatgga

SEQ ID NO: 13140 - DNA, 38 bp, Artificial Sequence
  Synthetic oligonucleotide
gtgccgccgaagatgctggatacatggacatgttctga

SEQ ID NO: 13141 - DNA, 37 bp, Artificial Sequence
  Synthetic oligonucleotide
gtgcgcagtcgatccattaacgcactcatcccggaga

SEQ ID NO: 13142 - DNA, 38 bp, Artificial Sequence
  Synthetic oligonucleotide
gttggcgaggtcgcgttggtaagcgaggcccgtggtga

SEQ ID NO: 13143 - DNA, 37 bp, Artificial Sequence
  Synthetic oligonucleotide
tacacgcccacctgcctataattgtggcccacaacga

SEQ ID NO: 13144 - DNA, 36 bp, Artificial Sequence
  Synthetic oligonucleotide
tacgcaagcagagagttaacctaatcagacgtagca

SEQ ID NO: 13145 - DNA, 35 bp, Artificial Sequence
  Synthetic oligonucleotide
tacgcgcgaggtggagcgagtaacgcaacgaaaca

SEQ ID NO: 13146 - DNA, 36 bp, Artificial Sequence
  Synthetic oligonucleotide
tcaccccgaagacgcgacgtagcaacagtaatcgca

SEQ ID NO: 13147 - DNA, 37 bp, Artificial Sequence
  Synthetic oligonucleotide
tcatccgcacacaccagccgtaaaggtccgcccatga

SEQ ID NO: 13148 - DNA, 35 bp, Artificial Sequence
  Synthetic oligonucleotide
tcatgcaaaccgcctgtctctgacacatcttacac

SEQ ID NO: 13149 - DNA, 38 bp, Artificial Sequence
  Synthetic oligonucleotide
tccgaagggcctttgcaacgcgagtgctgcattcatga

SEQ ID NO: 13150 - DNA, 35 bp, Artificial Sequence
  Synthetic oligonucleotide
tcgaacggtcctacgcagctgcttctccaacgagg

SEQ ID NO: 13151 - DNA, 37 bp, Artificial Sequence
  Synthetic oligonucleotide
tcgatggacgccggaaggacacgcatctattccctga

SEQ ID NO: 13152 - DNA, 35 bp, Artificial Sequence
  Synthetic oligonucleotide
tgaaccacaagttcaacgtgccgccaacaccttac

SEQ ID NO: 13153 - DNA, 38 bp, Artificial Sequence
  Synthetic oligonucleotide
tgacacagccggagattattgttagtgacacgttttga

SEQ ID NO: 13154 - DNA, 37 bp, Artificial Sequence
  Synthetic oligonucleotide
tgccgcaggtggggcgtgtgaaagttagactgggcga

SEQ ID NO: 13155 - DNA, 36 bp, Artificial Sequence
  Synthetic oligonucleotide
tgccggtcggatactaacactcgcctttcctctaca

SEQ ID NO: 13156 - DNA, 36 bp, Artificial Sequence
  Synthetic oligonucleotide
tgggacgcctcaccccggacctgcaaaagtcgccca

SEQ ID NO: 13157 - DNA, 37 bp, Artificial Sequence
  Synthetic oligonucleotide
tgtgccgttccaaactcagatcatccgatagtgctga

SEQ ID NO: 13158 - DNA, 37 bp, Artificial Sequence
  Synthetic oligonucleotide
ttggagtcggcctcccgtagatgtttataattacgga

SEQ ID NO: 13159 - DNA, 37 bp, Artificial Sequence
  Synthetic oligonucleotide
ttggtccgttcgccagctgacaagatacgtggtacga

SEQ ID NO: 13160 - DNA, 35 bp, Artificial Sequence
  Synthetic oligonucleotide
aacacgcgcactgtaatctgcgggatcaggaacgc

SEQ ID NO: 13161 - DNA, 35 bp, Artificial Sequence
  Synthetic oligonucleotide
aacacgtgcatggggtcataacagcaagtcgagca

SEQ ID NO: 13162 - DNA, 36 bp, Artificial Sequence
  Synthetic oligonucleotide
aacagggccacgacggcgattgtctgcaagttaaca

SEQ ID NO: 13163 - DNA, 38 bp, Artificial Sequence
  Synthetic oligonucleotide
aacgacacggtcgcatgacatccgaacaaaatccgtga

SEQ ID NO: 13164 - DNA, 38 bp, Artificial Sequence
  Synthetic oligonucleotide
aacgagcacccgagcgtggacatccagttgtggagtga

SEQ ID NO: 13165 - DNA, 35 bp, Artificial Sequence
  Synthetic oligonucleotide
aacgcgagaccagataccctttaaacaccctgtgc

SEQ ID NO: 13166 - DNA, 36 bp, Artificial Sequence
  Synthetic oligonucleotide
aatgcgacccagcgaaaaggatctcggtcagaatca

SEQ ID NO: 13167 - DNA, 36 bp, Artificial Sequence
  Synthetic oligonucleotide
acaacacaggccgacgagatgggatacagcacggta

SEQ ID NO: 13168 - DNA, 37 bp, Artificial Sequence
  Synthetic oligonucleotide
acacacgcggatcaaagatgtccattagccttatcga

SEQ ID NO: 13169 - DNA, 35 bp, Artificial Sequence
  Synthetic oligonucleotide
acacactgtcgacaaacgcgactcgatgcttgatt

SEQ ID NO: 13170 - DNA, 35 bp, Artificial Sequence
  Synthetic oligonucleotide
acacccacagcggtggacctgagtaagctgaaccc

SEQ ID NO: 13171 - DNA, 38 bp, Artificial Sequence
  Synthetic oligonucleotide
acacgacaggtacgcgcggaaagaagagtgtctgttga

SEQ ID NO: 13172 - DNA, 36 bp, Artificial Sequence
  Synthetic oligonucleotide
acagtcggaaagaggaggagtcatggactatacaga

SEQ ID NO: 13173 - DNA, 38 bp, Artificial Sequence
  Synthetic oligonucleotide
acatcgccacacgccatgctgtcttcgttaacccctga

SEQ ID NO: 13174 - DNA, 37 bp, Artificial Sequence
  Synthetic oligonucleotide
accacaacggacgacaaagagactgttcctacactga

SEQ ID NO: 13175 - DNA, 36 bp, Artificial Sequence
  Synthetic oligonucleotide
accagtgccggatggaacgtgctcgtatgcgtttca

SEQ ID NO: 13176 - DNA, 37 bp, Artificial Sequence
  Synthetic oligonucleotide
acccccagcccactgaatactcgcccgaatggcttga

SEQ ID NO: 13177 - DNA, 38 bp, Artificial Sequence
  Synthetic oligonucleotide
agccacggtaaaccacccatggtttgcgttttagatga

SEQ ID NO: 13178 - DNA, 36 bp, Artificial Sequence
  Synthetic oligonucleotide
agcgaaagcccacacattgatgctcctgatatctca

SEQ ID NO: 13179 - DNA, 35 bp, Artificial Sequence
  Synthetic oligonucleotide
atacaccgcagatcacgactaggaggcacaggcac

SEQ ID NO: 13180 - DNA, 35 bp, Artificial Sequence
  Synthetic oligonucleotide
ataccgccgtccctcgtgacgttgattcagaaggc

SEQ ID NO: 13181 - DNA, 35 bp, Artificial Sequence
  Synthetic oligonucleotide
atcgccgggggattgttagtgtgatcggatgaatg

SEQ ID NO: 13182 - DNA, 38 bp, Artificial Sequence
  Synthetic oligonucleotide
gaacgcagtctgtcagaaggttgtactctccagcttga

SEQ ID NO: 13183 - DNA, 37 bp, Artificial Sequence
  Synthetic oligonucleotide
gacaacgtagcggacgttttccagtgcgacgtctcga

SEQ ID NO: 13184 - DNA, 38 bp, Artificial Sequence
  Synthetic oligonucleotide
gacactgacatggtctggccattcaaagcagtatctga

SEQ ID NO: 13185 - DNA, 37 bp, Artificial Sequence
  Synthetic oligonucleotide
gaccactgccaggtgagttggtcgacgtaaactctga

SEQ ID NO: 13186 - DNA, 36 bp, Artificial Sequence
  Synthetic oligonucleotide
gaccagccgcaacggtttccgactccacgtcccaca

SEQ ID NO: 13187 - DNA, 35 bp, Artificial Sequence
  Synthetic oligonucleotide
gaccgcgtggcgacatagcatttgctcagaccttt

SEQ ID NO: 13188 - DNA, 36 bp, Artificial Sequence
  Synthetic oligonucleotide
gacgcaacgcagaaccccgtgacactctcttttgga

SEQ ID NO: 13189 - DNA, 35 bp, Artificial Sequence
  Synthetic oligonucleotide
gacgccaaacagtggtcgagtaacgtcgagtcgcg

SEQ ID NO: 13190 - DNA, 38 bp, Artificial Sequence
  Synthetic oligonucleotide
gacgcgatcgactcaggcgtatttcagcctacatctga

SEQ ID NO: 13191 - DNA, 35 bp, Artificial Sequence
  Synthetic oligonucleotide
gacgtagcccagagcaacgagacattaccgctgtg

SEQ ID NO: 13192 - DNA, 37 bp, Artificial Sequence
  Synthetic oligonucleotide
gacgtgagtcacgatgtatcgagggacgcccccgaga

SEQ ID NO: 13193 - DNA, 37 bp, Artificial Sequence
  Synthetic oligonucleotide
gagccgcataagtaatgcaggactgacttgagaatga

SEQ ID NO: 13194 - DNA, 36 bp, Artificial Sequence
  Synthetic oligonucleotide
gatgacgctgttagtgtgctttgtagttctcaggga

SEQ ID NO: 13195 - DNA, 38 bp, Artificial Sequence
  Synthetic oligonucleotide
gatgcgacccatgtacatctaaagagacgaacccatga

SEQ ID NO: 13196 - DNA, 37 bp, Artificial Sequence
  Synthetic oligonucleotide
gcacaccacacgccatgcgcactccactcttatttga

SEQ ID NO: 13197 - DNA, 35 bp, Artificial Sequence
  Synthetic oligonucleotide
gcacatgcacatgatggtactcatttggccaacat

SEQ ID NO: 13198 - DNA, 36 bp, Artificial Sequence
  Synthetic oligonucleotide
gccagacaacacgcgacgatagagacgtcaacacca

SEQ ID NO: 13199 - DNA, 37 bp, Artificial Sequence
  Synthetic oligonucleotide
gccgatgcatctacaggactaagccggttgggaccga

SEQ ID NO: 13200 - DNA, 37 bp, Artificial Sequence
  Synthetic oligonucleotide
gccgcatgagttcacccgttgactgagcttagctcga

SEQ ID NO: 13201 - DNA, 37 bp, Artificial Sequence
  Synthetic oligonucleotide
gcgaaggcactgtgcttgggtttagttatgcgcacta

SEQ ID NO: 13202 - DNA, 38 bp, Artificial Sequence
  Synthetic oligonucleotide
gctcccaaccaccaggtatctaccacttcccagaatga

SEQ ID NO: 13203 - DNA, 37 bp, Artificial Sequence
  Synthetic oligonucleotide
ggggccggatgcccccagactgagtcacctaaatcga

SEQ ID NO: 13204 - DNA, 35 bp, Artificial Sequence
  Synthetic oligonucleotide
ggtgacatcgaacggaaagtagaatcaggcttgag

SEQ ID NO: 13205 - DNA, 38 bp, Artificial Sequence
  Synthetic oligonucleotide
gtcaaagcaggggtcaatcatacatgaagattaactga

SEQ ID NO: 13206 - DNA, 36 bp, Artificial Sequence
  Synthetic oligonucleotide
gtcacaccagaggagtacgtgcaatgggatgaccga

SEQ ID NO: 13207 - DNA, 35 bp, Artificial Sequence
  Synthetic oligonucleotide
gtcacatcagtgcagtttatgatcgtcccaacgag

SEQ ID NO: 13208 - DNA, 35 bp, Artificial Sequence
  Synthetic oligonucleotide
gtcacgaagttcagtatgagtgacttatcgccgtg

SEQ ID NO: 13209 - DNA, 35 bp, Artificial Sequence
  Synthetic oligonucleotide
gtcgaacgccagtttactaaccatctttttttctg

SEQ ID NO: 13210 - DNA, 35 bp, Artificial Sequence
  Synthetic oligonucleotide
gtgatgcgcgcgaacctacaagaggtctcagatcc

SEQ ID NO: 13211 - DNA, 36 bp, Artificial Sequence
  Synthetic oligonucleotide
gtgcgatcctcagcttattggactcctcacgtatta

SEQ ID NO: 13212 - DNA, 37 bp, Artificial Sequence
  Synthetic oligonucleotide
taagacacgtaggatgtggtattaactcgatcggtga

SEQ ID NO: 13213 - DNA, 38 bp, Artificial Sequence
  Synthetic oligonucleotide
tacagcccagggtggtccgattcagggcagttgtatga

SEQ ID NO: 13214 - DNA, 38 bp, Artificial Sequence
  Synthetic oligonucleotide
tagccaaccaccgagaacaggtgtatcgcgcacaatga

SEQ ID NO: 13215 - DNA, 38 bp, Artificial Sequence
  Synthetic oligonucleotide
tagcgaggcatgtactcgaccggcatcaaacgatgtga

SEQ ID NO: 13216 - DNA, 38 bp, Artificial Sequence
  Synthetic oligonucleotide
tatgacgcaggcaagttacgactcacttcccaaagtga

SEQ ID NO: 13217 - DNA, 37 bp, Artificial Sequence
  Synthetic oligonucleotide
tcaaccacagtcggggtaagcgtagacaagctgggga

SEQ ID NO: 13218 - DNA, 35 bp, Artificial Sequence
  Synthetic oligonucleotide
tcagccggactgctgttgttgcatggccctttatt

SEQ ID NO: 13219 - DNA, 35 bp, Artificial Sequence
  Synthetic oligonucleotide
tcatgcacggatagttcatagtgtcaactgccgtt

SEQ ID NO: 13220 - DNA, 37 bp, Artificial Sequence
  Synthetic oligonucleotide
tccaacccaggccgattagagtgacgaagacagggga

SEQ ID NO: 13221 - DNA, 36 bp, Artificial Sequence
  Synthetic oligonucleotide
tccatgcccaacgatgcctagaccaccaggatggaa

SEQ ID NO: 13222 - DNA, 35 bp, Artificial Sequence
  Synthetic oligonucleotide
tcgagtagcctgtaatgaactaagtatttgacccg

SEQ ID NO: 13223 - DNA, 35 bp, Artificial Sequence
  Synthetic oligonucleotide
tgatcgcgcagtggtgttacggggtcagtgcaagc

SEQ ID NO: 13224 - DNA, 37 bp, Artificial Sequence
  Synthetic oligonucleotide
tgcgaacgcacggatgcggagattttgcgtttttaga

SEQ ID NO: 13225 - DNA, 37 bp, Artificial Sequence
  Synthetic oligonucleotide
tgcgaccggtcgataaggcatgtgcgatcgtggtaga

SEQ ID NO: 13226 - DNA, 35 bp, Artificial Sequence
  Synthetic oligonucleotide
tttgccgccctcatccacgccaccccaccaaatgg

SEQ ID NO: 13227 - DNA, 37 bp, Artificial Sequence
  Synthetic oligonucleotide
aacgagcgaaggtgtgatcggagtagtgtggcctaga

SEQ ID NO: 13228 - DNA, 37 bp, Artificial Sequence
  Synthetic oligonucleotide
aacgccggaagtgtgagagcttgcacagctcgcgcga

SEQ ID NO: 13229 - DNA, 37 bp, Artificial Sequence
  Synthetic oligonucleotide
aagccaacggggggggtgatgctggggttttggtaga

SEQ ID NO: 13230 - DNA, 38 bp, Artificial Sequence
  Synthetic oligonucleotide
acacacacagcagtagtgctctgggggacgaagtttga

SEQ ID NO: 13231 - DNA, 36 bp, Artificial Sequence
  Synthetic oligonucleotide
acacacgtaagcggttacttgcatctcagagagcta

SEQ ID NO: 13232 - DNA, 38 bp, Artificial Sequence
  Synthetic oligonucleotide
acacccgaccccgcgataagaaccctgagtaactctga

SEQ ID NO: 13233 - DNA, 35 bp, Artificial Sequence
  Synthetic oligonucleotide
acacctgacgcggttgacgacgcccacgtgaggct

SEQ ID NO: 13234 - DNA, 37 bp, Artificial Sequence
  Synthetic oligonucleotide
acagcctcggacgcatcatgaaagcctatgagaccga

SEQ ID NO: 13235 - DNA, 36 bp, Artificial Sequence
  Synthetic oligonucleotide
accacgccagatgggcagaccatccgcggatttgca

SEQ ID NO: 13236 - DNA, 35 bp, Artificial Sequence
  Synthetic oligonucleotide
acccacgatcgcagtggacaaaaggcacttgactt

SEQ ID NO: 13237 - DNA, 37 bp, Artificial Sequence
  Synthetic oligonucleotide
accgagcgcattggcaaacagtcttgccctacacaga

SEQ ID NO: 13238 - DNA, 35 bp, Artificial Sequence
  Synthetic oligonucleotide
accgcacccacaagtcttaagtgttgcacattgtt

SEQ ID NO: 13239 - DNA, 36 bp, Artificial Sequence
  Synthetic oligonucleotide
acgatgccgaacaggacgtgctgagtttgcaccaca

SEQ ID NO: 13240 - DNA, 38 bp, Artificial Sequence
  Synthetic oligonucleotide
acgcgacgaagggcttaataactcaacgtaagacctga

SEQ ID NO: 13241 - DNA, 35 bp, Artificial Sequence
  Synthetic oligonucleotide
actgcggccagtaacgtctattcacgcatgtatcg

SEQ ID NO: 13242 - DNA, 35 bp, Artificial Sequence
  Synthetic oligonucleotide
agccaacacagaaacggccgtccggtggtccctgg

SEQ ID NO: 13243 - DNA, 35 bp, Artificial Sequence
  Synthetic oligonucleotide
atccgaccgaacttgaacgctggtctatgtaacag

SEQ ID NO: 13244 - DNA, 37 bp, Artificial Sequence
  Synthetic oligonucleotide
gaacacgcaccagcagaggcttcgaagggtaggaaga

SEQ ID NO: 13245 - DNA, 36 bp, Artificial Sequence
  Synthetic oligonucleotide
gacaccaacggttggtggcacgcttcctggaacata

SEQ ID NO: 13246 - DNA, 35 bp, Artificial Sequence
  Synthetic oligonucleotide
gacaccacagaacgcgtcacacctggaggtctttg

SEQ ID NO: 13247 - DNA, 36 bp, Artificial Sequence
  Synthetic oligonucleotide
gacatagtcgggaaaaaagcatggactgttacgtaa

SEQ ID NO: 13248 - DNA, 36 bp, Artificial Sequence
  Synthetic oligonucleotide
gaccatgtggcgattatggcggacggtcctgcgaaa

SEQ ID NO: 13249 - DNA, 37 bp, Artificial Sequence
  Synthetic oligonucleotide
gatcaacgcaagatgagcgtatcttgctgatcaggga

SEQ ID NO: 13250 - DNA, 38 bp, Artificial Sequence
  Synthetic oligonucleotide
gatgccgcagagcgtggatatgacaggagcgggaatga

SEQ ID NO: 13251 - DNA, 35 bp, Artificial Sequence
  Synthetic oligonucleotide
gatgcgcacttcacatcccaggtctcatttattcg

SEQ ID NO: 13252 - DNA, 35 bp, Artificial Sequence
  Synthetic oligonucleotide
gcacacgaccgagtgatctgagtacctgtaatctg

SEQ ID NO: 13253 - DNA, 36 bp, Artificial Sequence
  Synthetic oligonucleotide
gcacgcgctagctttatctggagaaggatcaattca

SEQ ID NO: 13254 - DNA, 35 bp, Artificial Sequence
  Synthetic oligonucleotide
gcacgttgggggatcgaagtagacatgccctttcg

SEQ ID NO: 13255 - DNA, 36 bp, Artificial Sequence
  Synthetic oligonucleotide
gccgacacaatcacgacccttattcccgaccgccca

SEQ ID NO: 13256 - DNA, 38 bp, Artificial Sequence
  Synthetic oligonucleotide
gcctgctgtagtggtagataatcaactacgcctattga

SEQ ID NO: 13257 - DNA, 36 bp, Artificial Sequence
  Synthetic oligonucleotide
gcgatccagccaagactcttcatcgacgacatgtaa

SEQ ID NO: 13258 - DNA, 37 bp, Artificial Sequence
  Synthetic oligonucleotide
gcgccgggccaggcgcattaatagtcgtcgcgaacga

SEQ ID NO: 13259 - DNA, 38 bp, Artificial Sequence
  Synthetic oligonucleotide
gctgggaggcgccgcttgaagactggttttcgctttga

SEQ ID NO: 13260 - DNA, 38 bp, Artificial Sequence
  Synthetic oligonucleotide
ggacacgtgggcaagttacaatacgctctaatgtatga

SEQ ID NO: 13261 - DNA, 37 bp, Artificial Sequence
  Synthetic oligonucleotide
ggatcgccccaacattaacaggacactcatatcaaga

SEQ ID NO: 13262 - DNA, 38 bp, Artificial Sequence
  Synthetic oligonucleotide
ggtcaactccacactcattatctgccgtctgtctatga

SEQ ID NO: 13263 - DNA, 36 bp, Artificial Sequence
  Synthetic oligonucleotide
gtaacgcacgtgttgcaggccctgtacaggtatgta

SEQ ID NO: 13264 - DNA, 37 bp, Artificial Sequence
  Synthetic oligonucleotide
gtcacaccgcagctcagacccccagacattctttcaa

SEQ ID NO: 13265 - DNA, 36 bp, Artificial Sequence
  Synthetic oligonucleotide
gtcgaagcgcacacatattgtttccgagtacgtgtt

SEQ ID NO: 13266 - DNA, 36 bp, Artificial Sequence
  Synthetic oligonucleotide
gtgcggtgcaaaacatttgcggaggtcaatgcctaa

SEQ ID NO: 13267 - DNA, 35 bp, Artificial Sequence
  Synthetic oligonucleotide
gtgtacaccaacaaggctctctgtcagtgccaaca

SEQ ID NO: 13268 - DNA, 38 bp, Artificial Sequence
  Synthetic oligonucleotide
taaccatccacatccccccgagtcgttacagcctgtga

SEQ ID NO: 13269 - DNA, 37 bp, Artificial Sequence
  Synthetic oligonucleotide
tacccgacgcgaggtataaacgttgttaggccgacga

SEQ ID NO: 13270 - DNA, 36 bp, Artificial Sequence
  Synthetic oligonucleotide
taccgccacgcaattaggtttctggattatactgcg

SEQ ID NO: 13271 - DNA, 37 bp, Artificial Sequence
  Synthetic oligonucleotide
tacgcaacttaggtgaggcaagttggtagaaggatga

SEQ ID NO: 13272 - DNA, 35 bp, Artificial Sequence
  Synthetic oligonucleotide
tacgcacatagcacgtgggcatacatcctgaaatg

SEQ ID NO: 13273 - DNA, 36 bp, Artificial Sequence
  Synthetic oligonucleotide
tactcgcacgggccagtactgtatgttaaccgcgaa

SEQ ID NO: 13274 - DNA, 35 bp, Artificial Sequence
  Synthetic oligonucleotide
tagccacgcatggttgttagcctctaagcgtactg

SEQ ID NO: 13275 - DNA, 37 bp, Artificial Sequence
  Synthetic oligonucleotide
tcaacgcagagtccggggccatggaagatcgagaaga

SEQ ID NO: 13276 - DNA, 38 bp, Artificial Sequence
  Synthetic oligonucleotide
tcaacgggaacagccagccagcccttattccaccttga

SEQ ID NO: 13277 - DNA, 36 bp, Artificial Sequence
  Synthetic oligonucleotide
tcaccgcaaagtagcagaagagctaacggggggaga

SEQ ID NO: 13278 - DNA, 37 bp, Artificial Sequence
  Synthetic oligonucleotide
tcacgcccacgcatatgtgagctctgtagtccccaga

SEQ ID NO: 13279 - DNA, 35 bp, Artificial Sequence
  Synthetic oligonucleotide
tcagtgccgcgagaatgaaaagaactcgcctcatg

SEQ ID NO: 13280 - DNA, 35 bp, Artificial Sequence
  Synthetic oligonucleotide
tccacaccgcagggatcggggctgatgctagcgaa

SEQ ID NO: 13281 - DNA, 37 bp, Artificial Sequence
  Synthetic oligonucleotide
tccaccgcgagatgacaagctgcatcgactgaccgga

SEQ ID NO: 13282 - DNA, 36 bp, Artificial Sequence
  Synthetic oligonucleotide
tcgagtggaacgctgaccgaggagaccgaaggcata

SEQ ID NO: 13283 - DNA, 35 bp, Artificial Sequence
  Synthetic oligonucleotide
tgacacagtgcagctatatgccttaccgccgaaaa

SEQ ID NO: 13284 - DNA, 36 bp, Artificial Sequence
  Synthetic oligonucleotide
tgacgcgggaaggcgactgtgattcagaaggtgtga

SEQ ID NO: 13285 - DNA, 35 bp, Artificial Sequence
  Synthetic oligonucleotide
tgaggacacaggacaggggtctttgcatactcgtg

SEQ ID NO: 13286 - DNA, 36 bp, Artificial Sequence
  Synthetic oligonucleotide
tgaggaggcactggcaaaagatatagtcataatcga

SEQ ID NO: 13287 - DNA, 37 bp, Artificial Sequence
  Synthetic oligonucleotide
tgcaagcacaagcgagacggtaagttcgaggtcgcga

SEQ ID NO: 13288 - DNA, 38 bp, Artificial Sequence
  Synthetic oligonucleotide
tgccgaggctagtgagacagagataagatacgtgctga

SEQ ID NO: 13289 - DNA, 35 bp, Artificial Sequence
  Synthetic oligonucleotide
tgcgaagcaactcggtatgatgtagtctttggtga

SEQ ID NO: 13290 - DNA, 35 bp, Artificial Sequence
  Synthetic oligonucleotide
tgcggagcaacggtaaacgtgcagtaaacagcttg

SEQ ID NO: 13291 - DNA, 35 bp, Artificial Sequence
  Synthetic oligonucleotide
ttgactaggcggtccttgtgacaatccacccaaat

SEQ ID NO: 13292 - DNA, 37 bp, Artificial Sequence
  Synthetic oligonucleotide
ttgatcggccccatgactgtctattagtgagcataga

SEQ ID NO: 13293 - DNA, 38 bp, Artificial Sequence
  Synthetic oligonucleotide
aacaaccccgattataccccgattcacgtttcggatga

SEQ ID NO: 13294 - DNA, 35 bp, Artificial Sequence
  Synthetic oligonucleotide
aacacgcacacgagtttagtccgggacgagttcaa

SEQ ID NO: 13295 - DNA, 38 bp, Artificial Sequence
  Synthetic oligonucleotide
acacagccacggcggtcttactcaccaggtcatggtga

SEQ ID NO: 13296 - DNA, 36 bp, Artificial Sequence
  Synthetic oligonucleotide
acactcgggccttgaaccagtaccataacaggctta

SEQ ID NO: 13297 - DNA, 38 bp, Artificial Sequence
  Synthetic oligonucleotide
acatcccgcggtgggcggatttcgggtcattgggatga

SEQ ID NO: 13298 - DNA, 37 bp, Artificial Sequence
  Synthetic oligonucleotide
acgtgacggtcgcatgtcaatttttcggtctggttga

SEQ ID NO: 13299 - DNA, 35 bp, Artificial Sequence
  Synthetic oligonucleotide
actacacccagcaaacagacacgttcacatgagtg

SEQ ID NO: 13300 - DNA, 36 bp, Artificial Sequence
  Synthetic oligonucleotide
actcacagcaggcctaggtatgcgatcagtgaacta

SEQ ID NO: 13301 - DNA, 35 bp, Artificial Sequence
  Synthetic oligonucleotide
actgacggtaacgtcactttgagtctcgtgctccc

SEQ ID NO: 13302 - DNA, 38 bp, Artificial Sequence
  Synthetic oligonucleotide
agacggagcagaagccggaccgtttaagtaagtcatga

SEQ ID NO: 13303 - DNA, 35 bp, Artificial Sequence
  Synthetic oligonucleotide
atgcaggcaccaacctctatgacgagaatcggggt

SEQ ID NO: 13304 - DNA, 38 bp, Artificial Sequence
  Synthetic oligonucleotide
attgccaccgtggatggcgtagcagacatgttctctga

SEQ ID NO: 13305 - DNA, 38 bp, Artificial Sequence
  Synthetic oligonucleotide
catgggggaggctgagtagggtaaagcgttctgggtga

SEQ ID NO: 13306 - DNA, 35 bp, Artificial Sequence
  Synthetic oligonucleotide
ccaaacagcggattagcagctaatcaagcgacatt

SEQ ID NO: 13307 - DNA, 37 bp, Artificial Sequence
  Synthetic oligonucleotide
cggaggtggggggattggtgaggggaagggtggttga

SEQ ID NO: 13308 - DNA, 38 bp, Artificial Sequence
  Synthetic oligonucleotide
gacacgtacgctaactggacggtttctccgggaattga

SEQ ID NO: 13309 - DNA, 36 bp, Artificial Sequence
  Synthetic oligonucleotide
gaccaacggacataacggcgtaaggcggactttaga

SEQ ID NO: 13310 - DNA, 35 bp, Artificial Sequence
  Synthetic oligonucleotide
gaccaccacgcgaacagacacggtcggtgcaaacg

SEQ ID NO: 13311 - DNA, 37 bp, Artificial Sequence
  Synthetic oligonucleotide
gacgacaacagggattataggtgatgagtggaagcga

SEQ ID NO: 13312 - DNA, 35 bp, Artificial Sequence
  Synthetic oligonucleotide
gacgaccatggtggagaacgtcctgtgcccacacg

SEQ ID NO: 13313 - DNA, 35 bp, Artificial Sequence
  Synthetic oligonucleotide
gacgctggccgagtaaaagaacaagtaggtgaagt

SEQ ID NO: 13314 - DNA, 36 bp, Artificial Sequence
  Synthetic oligonucleotide
gagtccgctagctccagtgacgagctgtgtgtaaca

SEQ ID NO: 13315 - DNA, 37 bp, Artificial Sequence
  Synthetic oligonucleotide
gatagcacgacgggtaaacgacgcgccttgtagatga

SEQ ID NO: 13316 - DNA, 35 bp, Artificial Sequence
  Synthetic oligonucleotide
gatgaacagcggtcgagagattgtgcggaaggtag

SEQ ID NO: 13317 - DNA, 37 bp, Artificial Sequence
  Synthetic oligonucleotide
gatgcaaccgctgggtgtgtacgtcaaaggcattaga

SEQ ID NO: 13318 - DNA, 34 bp, Artificial Sequence
  Synthetic oligonucleotide
gatgcgcaacagttactcaccaccaccccctccc

SEQ ID NO: 13319 - DNA, 37 bp, Artificial Sequence
  Synthetic oligonucleotide
gcaacacaaaatgcgaccgcgctgttattggcttgga

SEQ ID NO: 13320 - DNA, 36 bp, Artificial Sequence
  Synthetic oligonucleotide
gcacaaggggcggtgtgtgtgtcgacggatggagga

SEQ ID NO: 13321 - DNA, 36 bp, Artificial Sequence
  Synthetic oligonucleotide
gcatcctcaccgtgaccctgctccgtctactaaaga

SEQ ID NO: 13322 - DNA, 38 bp, Artificial Sequence
  Synthetic oligonucleotide
gccaacatcggccggatgtggtagtacaacgccactga

SEQ ID NO: 13323 - DNA, 36 bp, Artificial Sequence
  Synthetic oligonucleotide
gccaacgacggcgcataggtaattgcccctagtaca

SEQ ID NO: 13324 - DNA, 35 bp, Artificial Sequence
  Synthetic oligonucleotide
gccacatacagacggtaatcggggagaaagagttg

SEQ ID NO: 13325 - DNA, 35 bp, Artificial Sequence
  Synthetic oligonucleotide
gccaccagtcgctatgactaattccgacactacat

SEQ ID NO: 13326 - DNA, 36 bp, Artificial Sequence
  Synthetic oligonucleotide
gcccacagcaagatggtgactggctacgttcctcaa

SEQ ID NO: 13327 - DNA, 35 bp, Artificial Sequence
  Synthetic oligonucleotide
gcccacgcaaggacctagacacgaagcaaaaaccg

SEQ ID NO: 13328 - DNA, 35 bp, Artificial Sequence
  Synthetic oligonucleotide
gccgcacctcgaaacgtactatctgtcctcacctt

SEQ ID NO: 13329 - DNA, 37 bp, Artificial Sequence
  Synthetic oligonucleotide
gcctccggaccccgactctgaccccgtacaatttaga

SEQ ID NO: 13330 - DNA, 38 bp, Artificial Sequence
  Synthetic oligonucleotide
gcgatcgtgcgacgcaaatcggagagtgattgaactga

SEQ ID NO: 13331 - DNA, 37 bp, Artificial Sequence
  Synthetic oligonucleotide
gctagagtcggacgtgaagtaatggaacgtgtgctga

SEQ ID NO: 13332 - DNA, 35 bp, Artificial Sequence
  Synthetic oligonucleotide
gctggaggctcaacggaaagaaggaccttttgtgg

SEQ ID NO: 13333 - DNA, 37 bp, Artificial Sequence
  Synthetic oligonucleotide
ggaccgccagtgtcctatatcacgggcataccaaaga

SEQ ID NO: 13334 - DNA, 36 bp, Artificial Sequence
  Synthetic oligonucleotide
ggtcaagccgctaagtaccacggagatactaataga

SEQ ID NO: 13335 - DNA, 38 bp, Artificial Sequence
  Synthetic oligonucleotide
gtccacaccaggctaagcgtaagaggaactcgcggtga

SEQ ID NO: 13336 - DNA, 35 bp, Artificial Sequence
  Synthetic oligonucleotide
gtgacaggccagaaacaacagacgtttcgatcata

SEQ ID NO: 13337 - DNA, 35 bp, Artificial Sequence
  Synthetic oligonucleotide
gtgaccagccgcaagtgacgttaaggcctcagtcc

SEQ ID NO: 13338 - DNA, 38 bp, Artificial Sequence
  Synthetic oligonucleotide
gtgaccgcaggagatgagattagtagaggagtgcatga

SEQ ID NO: 13339 - DNA, 37 bp, Artificial Sequence
  Synthetic oligonucleotide
gtgcagtcaggacgcaactgacgacgttcgggaaaga

SEQ ID NO: 13340 - DNA, 35 bp, Artificial Sequence
  Synthetic oligonucleotide
gtgcgcaacgcatggtgtgtagattgagggattgg

SEQ ID NO: 13341 - DNA, 37 bp, Artificial Sequence
  Synthetic oligonucleotide
gtggatcagggtgcagtaagacgattacgtggctaga

SEQ ID NO: 13342 - DNA, 37 bp, Artificial Sequence
  Synthetic oligonucleotide
gtggggacgccgttagtcatgggatacacgagaggga

SEQ ID NO: 13343 - DNA, 38 bp, Artificial Sequence
  Synthetic oligonucleotide
gtgtgccgtagagatagtggcatgtaggaaagcggtga

SEQ ID NO: 13344 - DNA, 38 bp, Artificial Sequence
  Synthetic oligonucleotide
tacacatgcagtatgtggtgtcgtatcagctcctttga

SEQ ID NO: 13345 - DNA, 38 bp, Artificial Sequence
  Synthetic oligonucleotide
tacgccggtgagtaagagtgaagcataaggatgtgtga

SEQ ID NO: 13346 - DNA, 35 bp, Artificial Sequence
  Synthetic oligonucleotide
tagtacgcgcggatcggggccgaagagtctgctga

SEQ ID NO: 13347 - DNA, 35 bp, Artificial Sequence
  Synthetic oligonucleotide
tcaaccaactgggcgaacgttatgcgggactatta

SEQ ID NO: 13348 - DNA, 35 bp, Artificial Sequence
  Synthetic oligonucleotide
tcacaccgcacgttggtttcgtgtagtcacacatt

SEQ ID NO: 13349 - DNA, 37 bp, Artificial Sequence
  Synthetic oligonucleotide
tcaccccatacgcacggtgcaacaggactgagtatga

SEQ ID NO: 13350 - DNA, 37 bp, Artificial Sequence
  Synthetic oligonucleotide
tcaccccgcacctataattatgaccccgacctgccgt

SEQ ID NO: 13351 - DNA, 36 bp, Artificial Sequence
  Synthetic oligonucleotide
tcaccgcccgtcgatttatcggtcacatcacgatta

SEQ ID NO: 13352 - DNA, 35 bp, Artificial Sequence
  Synthetic oligonucleotide
tcaccgggtggtgacgcaggtccgtcccttatacg

SEQ ID NO: 13353 - DNA, 36 bp, Artificial Sequence
  Synthetic oligonucleotide
tccgcggtcacgagcctacagttattggaaggtata

SEQ ID NO: 13354 - DNA, 35 bp, Artificial Sequence
  Synthetic oligonucleotide
tgaccacgcatgagatgtgaggcgcaacgatcttg

SEQ ID NO: 13355 - DNA, 35 bp, Artificial Sequence
  Synthetic oligonucleotide
tgagagcaacgtaaaccaaaccgatttatgactgg

SEQ ID NO: 13356 - DNA, 35 bp, Artificial Sequence
  Synthetic oligonucleotide
tgcgacgacatagcataacaggcgctttttgcggt

SEQ ID NO: 13357 - DNA, 38 bp, Artificial Sequence
  Synthetic oligonucleotide
tgtggggtagggtaacgaatcacagaccaacgtggtga

SEQ ID NO: 13358 - DNA, 36 bp, Artificial Sequence
  Synthetic oligonucleotide
ttgcacatccgagaggaagctgggtcactattcgta

SEQ ID NO: 13359 - DNA, 37 bp, Artificial Sequence
  Synthetic oligonucleotide
ttgggagggagacctgggtcgttaggtgaagttctga

SEQ ID NO: 13360 - DNA, 38 bp, Artificial Sequence
  Synthetic oligonucleotide
aacccaccctcctaactctaacatgcagtctgctgtga

SEQ ID NO: 13361 - DNA, 37 bp, Artificial Sequence
  Synthetic oligonucleotide
acacaccagctgagctagaaaccgtagactgccgtga

SEQ ID NO: 13362 - DNA, 36 bp, Artificial Sequence
  Synthetic oligonucleotide
acacaccgcaatcttgcacgagtacacaccctctaa

SEQ ID NO: 13363 - DNA, 36 bp, Artificial Sequence
  Synthetic oligonucleotide
accaccgccgcattctaataagactccgtcccgtga

SEQ ID NO: 13364 - DNA, 36 bp, Artificial Sequence
  Synthetic oligonucleotide
acgcacaggcccgttgacaacattctccatttctca

SEQ ID NO: 13365 - DNA, 34 bp, Artificial Sequence
  Synthetic oligonucleotide
atcccgtccgtcgcatcttacgtacccaccctta

SEQ ID NO: 13366 - DNA, 36 bp, Artificial Sequence
  Synthetic oligonucleotide
atgcacgggatgcgtgagaatacactgttagggaaa

SEQ ID NO: 13367 - DNA, 38 bp, Artificial Sequence
  Synthetic oligonucleotide
atgccacacaacgtgcgaacttgtaacggatggaatga

SEQ ID NO: 13368 - DNA, 38 bp, Artificial Sequence
  Synthetic oligonucleotide
atgcccgacggtgccttgtgagaaaaagtaagttctga

SEQ ID NO: 13369 - DNA, 35 bp, Artificial Sequence
  Synthetic oligonucleotide
atgcgacaggaagttagtgatttttgcgtaaggtg

SEQ ID NO: 13370 - DNA, 35 bp, Artificial Sequence
  Synthetic oligonucleotide
atgtcatacgcatgctttactgaccccgtaattca

SEQ ID NO: 13371 - DNA, 37 bp, Artificial Sequence
  Synthetic oligonucleotide
cacccgtgccccttgaagttcgttctaaagagatcga

SEQ ID NO: 13372 - DNA, 36 bp, Artificial Sequence
  Synthetic oligonucleotide
gacaaaccccgctgcatatgcgtaactgtcctctga

SEQ ID NO: 13373 - DNA, 38 bp, Artificial Sequence
  Synthetic oligonucleotide
gacacagcaaccagcgcccatagaaaaggacagtgtga

SEQ ID NO: 13374 - DNA, 37 bp, Artificial Sequence
  Synthetic oligonucleotide
gacacccccgttatttacctcgagcagttgatcacga

SEQ ID NO: 13375 - DNA, 37 bp, Artificial Sequence
  Synthetic oligonucleotide
gacacggaggtcagataatttcgaggcactttgctga

SEQ ID NO: 13376 - DNA, 36 bp, Artificial Sequence
  Synthetic oligonucleotide
gacccacgacctatgtctgacatacccgacgtccaa

SEQ ID NO: 13377 - DNA, 35 bp, Artificial Sequence
  Synthetic oligonucleotide
gaccccgcaatttgtacgaagattaaacctcgacg

SEQ ID NO: 13378 - DNA, 38 bp, Artificial Sequence
  Synthetic oligonucleotide
gacgaccgcctctacatgctgctcaccaaacactctga

SEQ ID NO: 13379 - DNA, 36 bp, Artificial Sequence
  Synthetic oligonucleotide
gacgagccggtgcgagggcgaaagctcaagggtaga

SEQ ID NO: 13380 - DNA, 35 bp, Artificial Sequence
  Synthetic oligonucleotide
gacgcaaaggcggacatgataagctctccgaatgg

SEQ ID NO: 13381 - DNA, 37 bp, Artificial Sequence
  Synthetic oligonucleotide
gacgcgggaactgtgctgggtcacccgttctagacga

SEQ ID NO: 13382 - DNA, 36 bp, Artificial Sequence
  Synthetic oligonucleotide
gacgctgtacagaacgcgaatcgaattgagacgtaa

SEQ ID NO: 13383 - DNA, 36 bp, Artificial Sequence
  Synthetic oligonucleotide
gacggacacgttacagcaagagacaagtgatggtca

SEQ ID NO: 13384 - DNA, 35 bp, Artificial Sequence
  Synthetic oligonucleotide
gagtgcgccccagtgccctgttcccttagtttacc

SEQ ID NO: 13385 - DNA, 38 bp, Artificial Sequence
  Synthetic oligonucleotide
gatgacgccgtccagtactaaggcacacctgcgattga

SEQ ID NO: 13386 - DNA, 38 bp, Artificial Sequence
  Synthetic oligonucleotide
gatggacacgcggtagtgagtctcagtgtgtcttttga

SEQ ID NO: 13387 - DNA, 35 bp, Artificial Sequence
  Synthetic oligonucleotide
gatggggcgcacattcaggacaacagccgtaccaa

SEQ ID NO: 13388 - DNA, 37 bp, Artificial Sequence
  Synthetic oligonucleotide
gcaacatcggcaaccaacataaacattctaagtccga

SEQ ID NO: 13389 - DNA, 36 bp, Artificial Sequence
  Synthetic oligonucleotide
gcaagggtcgtgcagtaaatatcgcagtaacaagga

SEQ ID NO: 13390 - DNA, 37 bp, Artificial Sequence
  Synthetic oligonucleotide
gcaccctagcgcatgtccccagataaagttagcacga

SEQ ID NO: 13391 - DNA, 37 bp, Artificial Sequence
  Synthetic oligonucleotide
gccaacacctcacatccttatctggggcacagaagga

SEQ ID NO: 13392 - DNA, 35 bp, Artificial Sequence
  Synthetic oligonucleotide
gccaagctgaacgtaagacagagcgtttaagttgg

SEQ ID NO: 13393 - DNA, 37 bp, Artificial Sequence
  Synthetic oligonucleotide
gccattaccaactaatggaaaagaatggagtcaggga

SEQ ID NO: 13394 - DNA, 37 bp, Artificial Sequence
  Synthetic oligonucleotide
gcccacgccgagagctcgaaaggagacgctgaccaga

SEQ ID NO: 13395 - DNA, 36 bp, Artificial Sequence
  Synthetic oligonucleotide
gccgaaccagcatctagagccctcctcatcaactca

SEQ ID NO: 13396 - DNA, 36 bp, Artificial Sequence
  Synthetic oligonucleotide
gccgcacactcgaactagttgcgtataagcctttga

SEQ ID NO: 13397 - DNA, 35 bp, Artificial Sequence
  Synthetic oligonucleotide
gccggagcccggatcacggttaccatcacatatcg

SEQ ID NO: 13398 - DNA, 38 bp, Artificial Sequence
  Synthetic oligonucleotide
gccggaggcaccacatcacgaagtcgactgccatatga

SEQ ID NO: 13399 - DNA, 36 bp, Artificial Sequence
  Synthetic oligonucleotide
gcgaagcaacgaatggcaaaagacgccgaaccttca

SEQ ID NO: 13400 - DNA, 38 bp, Artificial Sequence
  Synthetic oligonucleotide
gcgagcggagtcgagcacatagaggcttatctagatga

SEQ ID NO: 13401 - DNA, 38 bp, Artificial Sequence
  Synthetic oligonucleotide
gctgactgcatgcaagccgcttaccaacactccgctga

SEQ ID NO: 13402 - DNA, 36 bp, Artificial Sequence
  Synthetic oligonucleotide
gctgcagagcagaagacttcgacccaccgctctaca

SEQ ID NO: 13403 - DNA, 36 bp, Artificial Sequence
  Synthetic oligonucleotide
gctgccactgcaactgaccccgttaaaggaacatca

SEQ ID NO: 13404 - DNA, 36 bp, Artificial Sequence
  Synthetic oligonucleotide
ggaaccacgtgaggtactcgataaacatgctcatca

SEQ ID NO: 13405 - DNA, 37 bp, Artificial Sequence
  Synthetic oligonucleotide
ggacaccgaccaaacacgtagcagtccctcagtacga

SEQ ID NO: 13406 - DNA, 38 bp, Artificial Sequence
  Synthetic oligonucleotide
gtagcaccaacggtcttaccgagcatctgatgccttga

SEQ ID NO: 13407 - DNA, 38 bp, Artificial Sequence
  Synthetic oligonucleotide
gtcgcgcatggacggtgataagggaaaatgttctatga

SEQ ID NO: 13408 - DNA, 35 bp, Artificial Sequence
  Synthetic oligonucleotide
gtgagacgccacatttgacgtcatgaattaatgct

SEQ ID NO: 13409 - DNA, 35 bp, Artificial Sequence
  Synthetic oligonucleotide
gtgccacgtagtatgccatgacgtttgactttacc

SEQ ID NO: 13410 - DNA, 35 bp, Artificial Sequence
  Synthetic oligonucleotide
gtgcggagctgcatgaccaatacaccatcaccttt

SEQ ID NO: 13411 - DNA, 36 bp, Artificial Sequence
  Synthetic oligonucleotide
gtgcgggcagagttggcccagatttacagccctcta

SEQ ID NO: 13412 - DNA, 36 bp, Artificial Sequence
  Synthetic oligonucleotide
gtggccgaccgtgcttatcgattcaaggtgacgata

SEQ ID NO: 13413 - DNA, 36 bp, Artificial Sequence
  Synthetic oligonucleotide
tacacgtgcgggatgacgcgaccatccaccgttata

SEQ ID NO: 13414 - DNA, 37 bp, Artificial Sequence
  Synthetic oligonucleotide
tacatcgcggtcatgacagaagataatctcacggtga

SEQ ID NO: 13415 - DNA, 38 bp, Artificial Sequence
  Synthetic oligonucleotide
tacatgccccagctggattagtcgtcgcgttcgtttga

SEQ ID NO: 13416 - DNA, 35 bp, Artificial Sequence
  Synthetic oligonucleotide
tactgccggctacaacctaggatcgtccactcatt

SEQ ID NO: 13417 - DNA, 38 bp, Artificial Sequence
  Synthetic oligonucleotide
tagcgcaccacgtgaggttacgatccaatgtcttctga

SEQ ID NO: 13418 - DNA, 36 bp, Artificial Sequence
  Synthetic oligonucleotide
tagtgccatggcatgtgtccagcaatacatacgata

SEQ ID NO: 13419 - DNA, 38 bp, Artificial Sequence
  Synthetic oligonucleotide
tcaacccgcgagtcatcttgcaggtgcaccggaggtga

SEQ ID NO: 13420 - DNA, 38 bp, Artificial Sequence
  Synthetic oligonucleotide
tcacaccgcggtctaggtaccctgcacagtctttctga

SEQ ID NO: 13421 - DNA, 38 bp, Artificial Sequence
  Synthetic oligonucleotide
tcacgataccgacggtaaaaggaacgttacatgagtga

SEQ ID NO: 13422 - DNA, 37 bp, Artificial Sequence
  Synthetic oligonucleotide
tcagtacctgcatcctacatctcgttccgttggaaga

SEQ ID NO: 13423 - DNA, 37 bp, Artificial Sequence
  Synthetic oligonucleotide
tccaaacgtgcgagagtaaacgccctggttagcacga

SEQ ID NO: 13424 - DNA, 35 bp, Artificial Sequence
  Synthetic oligonucleotide
tccacgcacgattagaacgaacatactcacgctgc

SEQ ID NO: 13425 - DNA, 35 bp, Artificial Sequence
  Synthetic oligonucleotide
tgaccgccggttacagacatggacaacgtcgaaat

SEQ ID NO: 13426 - DNA, 35 bp, Artificial Sequence
  Synthetic oligonucleotide
tgccaagaacaggctcataaggagtagtccgaact

SEQ ID NO: 13427 - DNA, 38 bp, Artificial Sequence
  Synthetic oligonucleotide
tgcccgatcaagtgcgtggtgaagggccaaggccttga

SEQ ID NO: 13428 - DNA, 37 bp, Artificial Sequence
  Synthetic oligonucleotide
tgcgacggtactgtgtgctgggcatcttaggggatga

SEQ ID NO: 13429 - DNA, 37 bp, Artificial Sequence
  Synthetic oligonucleotide
tgcggatgggtacgcttgagttctagggacggtggga

SEQ ID NO: 13430 - DNA, 36 bp, Artificial Sequence
  Synthetic oligonucleotide
tgctagccccgcggaatcaggctgtgtagttcaaga

SEQ ID NO: 13431 - DNA, 37 bp, Artificial Sequence
  Synthetic oligonucleotide
tgtcacgtagatgttcccatccacattcacgggtcga

SEQ ID NO: 13432 - DNA, 35 bp, Artificial Sequence
  Synthetic oligonucleotide
tgtgacgccttctgaacattaggcataacgttggc

SEQ ID NO: 13433 - DNA, 38 bp, Artificial Sequence
  Synthetic oligonucleotide
tgtgtccgctccgtccgccaaagtcaccgaccccctga

SEQ ID NO: 13434 - DNA, 37 bp, Artificial Sequence
  Synthetic oligonucleotide
ttgaccgaccaagcgcaccagacgcatggctatccga

SEQ ID NO: 13435 - DNA, 35 bp, Artificial Sequence
  Synthetic oligonucleotide
ttgtgcgaccggtctggatagagaggcgaacgatg

SEQ ID NO: 13436 - DNA, 36 bp, Artificial Sequence
  Synthetic oligonucleotide
aacaccacgcagccatggtactaagactcaactgaa

SEQ ID NO: 13437 - DNA, 37 bp, Artificial Sequence
  Synthetic oligonucleotide
aacatgccagtgctgtcgtgacaaggttagtcgagga

SEQ ID NO: 13438 - DNA, 36 bp, Artificial Sequence
  Synthetic oligonucleotide
aacgaccacatctcgatcctaattcaaccccgctaa

SEQ ID NO: 13439 - DNA, 37 bp, Artificial Sequence
  Synthetic oligonucleotide
aacgaccacgcacgcctgtgtagatgtgaagtgaaga

SEQ ID NO: 13440 - DNA, 38 bp, Artificial Sequence
  Synthetic oligonucleotide
aactgcaagcgcagtgaagatatttggagccgaattga

SEQ ID NO: 13441 - DNA, 38 bp, Artificial Sequence
  Synthetic oligonucleotide
acaacagcaggtgcgtgtctacttcctcgccttattga

SEQ ID NO: 13442 - DNA, 35 bp, Artificial Sequence
  Synthetic oligonucleotide
acacgacgaagagggattttgaaagacggtagaag

SEQ ID NO: 13443 - DNA, 34 bp, Artificial Sequence
  Synthetic oligonucleotide
acacgcgaactaatggcgttaaatagcttttaca

SEQ ID NO: 13444 - DNA, 36 bp, Artificial Sequence
  Synthetic oligonucleotide
acgctcaaccccgacttttcctaaccccgtgatgta

SEQ ID NO: 13445 - DNA, 38 bp, Artificial Sequence
  Synthetic oligonucleotide
actgaccccgtgaagcttccccccactcttactcatga

SEQ ID NO: 13446 - DNA, 35 bp, Artificial Sequence
  Synthetic oligonucleotide
agcacagtccggcgcacaaatcaacgcacctacta

SEQ ID NO: 13447 - DNA, 35 bp, Artificial Sequence
  Synthetic oligonucleotide
agtgagccgacgggggatttgtatgcgtgtgggaa

SEQ ID NO: 13448 - DNA, 35 bp, Artificial Sequence
  Synthetic oligonucleotide
atacgctgcagtaaaaagagcactctctgccgttc

SEQ ID NO: 13449 - DNA, 37 bp, Artificial Sequence
  Synthetic oligonucleotide
atgacaccagtcatcaccctcctcacgccaatggcga

SEQ ID NO: 13450 - DNA, 35 bp, Artificial Sequence
  Synthetic oligonucleotide
atgacacccgaaggtactaacgatgcgtccatact

SEQ ID NO: 13451 - DNA, 38 bp, Artificial Sequence
  Synthetic oligonucleotide
atggacgggcaaaggttcggtaggaagcacttcgatga

SEQ ID NO: 13452 - DNA, 36 bp, Artificial Sequence
  Synthetic oligonucleotide
cacagtcgtgcccgatcgtgtgatatagcgctatta

SEQ ID NO: 13453 - DNA, 36 bp, Artificial Sequence
  Synthetic oligonucleotide
cggctctgtcgcaggacagaagtcgaattgccacaa

SEQ ID NO: 13454 - DNA, 36 bp, Artificial Sequence
  Synthetic oligonucleotide
gaacacgtccaagcccacgaagaatcgctttcgcta

SEQ ID NO: 13455 - DNA, 37 bp, Artificial Sequence
  Synthetic oligonucleotide
gaacatcgacgcagaggtcactcgtccgctctgaaga

SEQ ID NO: 13456 - DNA, 35 bp, Artificial Sequence
  Synthetic oligonucleotide
gacacacaaactcgactgtgctatgttctgaaata

SEQ ID NO: 13457 - DNA, 38 bp, Artificial Sequence
  Synthetic oligonucleotide
gacaccgtgaactcgtgggaggaccaatgcaacgatga

SEQ ID NO: 13458 - DNA, 38 bp, Artificial Sequence
  Synthetic oligonucleotide
gacacgcgcatccaggggtgactcctaagccaccttga

SEQ ID NO: 13459 - DNA, 36 bp, Artificial Sequence
  Synthetic oligonucleotide
gacccagccgcagtctgccttcgaacgtccatttca

SEQ ID NO: 13460 - DNA, 38 bp, Artificial Sequence
  Synthetic oligonucleotide
gaccctctagccccatcgattacggaactgtcggatga

SEQ ID NO: 13461 - DNA, 35 bp, Artificial Sequence
  Synthetic oligonucleotide
gacgacaaccctgaaatgcgcaataaagaaaaagg

SEQ ID NO: 13462 - DNA, 35 bp, Artificial Sequence
  Synthetic oligonucleotide
gacgacctaggtgacctaacagagtacacacatac

SEQ ID NO: 13463 - DNA, 36 bp, Artificial Sequence
  Synthetic oligonucleotide
gacgacgccggtctgcagggaattcggagactctga

SEQ ID NO: 13464 - DNA, 36 bp, Artificial Sequence
  Synthetic oligonucleotide
gacgcacggtcacgagtgggtttgcggtcccaagca

SEQ ID NO: 13465 - DNA, 36 bp, Artificial Sequence
  Synthetic oligonucleotide
gacgcagaagaggtcccgttaacagattcgcttgaa

SEQ ID NO: 13466 - DNA, 35 bp, Artificial Sequence
  Synthetic oligonucleotide
gacgcagaccctcgttacggaaagggatctgctgt

SEQ ID NO: 13467 - DNA, 37 bp, Artificial Sequence
  Synthetic oligonucleotide
gacgtgcgccgtgagcgtgtcgggagtgacttatcga

SEQ ID NO: 13468 - DNA, 38 bp, Artificial Sequence
  Synthetic oligonucleotide
gagcacgagcaggagagcatggacaggtttgacgttga

SEQ ID NO: 13469 - DNA, 36 bp, Artificial Sequence
  Synthetic oligonucleotide
gagggcacgggttgaggggtattcatgtcatctaaa

SEQ ID NO: 13470 - DNA, 37 bp, Artificial Sequence
  Synthetic oligonucleotide
gagtcgcccacccgtgcagcaagtccctacttctcga

SEQ ID NO: 13471 - DNA, 36 bp, Artificial Sequence
  Synthetic oligonucleotide
gagtgcggatgaggttcaagagagctgtcagagaga

SEQ ID NO: 13472 - DNA, 35 bp, Artificial Sequence
  Synthetic oligonucleotide
gatgcagttacacccgatctgtgccacaccattcc

SEQ ID NO: 13473 - DNA, 37 bp, Artificial Sequence
  Synthetic oligonucleotide
gatgcgccggcacgatgtccagttagggtagtcacga

SEQ ID NO: 13474 - DNA, 36 bp, Artificial Sequence
  Synthetic oligonucleotide
gatgtgggacgtcgacgtggtacagtcgtagtgtaa

SEQ ID NO: 13475 - DNA, 38 bp, Artificial Sequence
  Synthetic oligonucleotide
gcaaggtgcgatccagctacgtcaccagcatgacatga

SEQ ID NO: 13476 - DNA, 35 bp, Artificial Sequence
  Synthetic oligonucleotide
gcacggggagtaaaccattattacaattgtctgcg

SEQ ID NO: 13477 - DNA, 35 bp, Artificial Sequence
  Synthetic oligonucleotide
gcatgggccacgtgtttaatcgtaggggctgttac

SEQ ID NO: 13478 - DNA, 38 bp, Artificial Sequence
  Synthetic oligonucleotide
gccaaccgcagatgagtttaggtcggagcaatcgttga

SEQ ID NO: 13479 - DNA, 36 bp, Artificial Sequence
  Synthetic oligonucleotide
gccaaggaccggaagctcacctcacacagtactcga

SEQ ID NO: 13480 - DNA, 36 bp, Artificial Sequence
  Synthetic oligonucleotide
gccatgcatcattacagtatgatagctggtctttta

SEQ ID NO: 13481 - DNA, 35 bp, Artificial Sequence
  Synthetic oligonucleotide
gccgatgtccgtaagtgccacatgtaacgtggggg

SEQ ID NO: 13482 - DNA, 35 bp, Artificial Sequence
  Synthetic oligonucleotide
gccgccgaagcagacgtgaaagggtgtacgtggtg

SEQ ID NO: 13483 - DNA, 35 bp, Artificial Sequence
  Synthetic oligonucleotide
gccgtccgtgcgggtcggctccgagtcgacattac

SEQ ID NO: 13484 - DNA, 36 bp, Artificial Sequence
  Synthetic oligonucleotide
gcgcaacgcaaattctagttatcggtcatatgccaa

SEQ ID NO: 13485 - DNA, 36 bp, Artificial Sequence
  Synthetic oligonucleotide
gctgaggaccgagtattaggccggccgtcattcgta

SEQ ID NO: 13486 - DNA, 37 bp, Artificial Sequence
  Synthetic oligonucleotide
gctgcacataactcggatgcagcatgtcaaaaccaga

SEQ ID NO: 13487 - DNA, 37 bp, Artificial Sequence
  Synthetic oligonucleotide
gggaacgcactggggtcatacgcggcttggcgggaga

SEQ ID NO: 13488 - DNA, 36 bp, Artificial Sequence
  Synthetic oligonucleotide
gggccgggaggcagtccgagtagagaggatacataa

SEQ ID NO: 13489 - DNA, 38 bp, Artificial Sequence
  Synthetic oligonucleotide
gtcaaacgacagaaagtgcacgagagagggcatcgtga

SEQ ID NO: 13490 - DNA, 35 bp, Artificial Sequence
  Synthetic oligonucleotide
gtcaacgcagccctgcctccccaacacactccctt

SEQ ID NO: 13491 - DNA, 37 bp, Artificial Sequence
  Synthetic oligonucleotide
gtcacaccgcagctcagacccccagacattctgtcag

SEQ ID NO: 13492 - DNA, 35 bp, Artificial Sequence
  Synthetic oligonucleotide
gtgcaaccgatctgggctaaaccacggatggaatg

SEQ ID NO: 13493 - DNA, 35 bp, Artificial Sequence
  Synthetic oligonucleotide
gtgcacatccgctcccgttccgcccttctttagcc

SEQ ID NO: 13494 - DNA, 35 bp, Artificial Sequence
  Synthetic oligonucleotide
gtgcgcatcaagcctgacgcaagcagaccctactg

SEQ ID NO: 13495 - DNA, 35 bp, Artificial Sequence
  Synthetic oligonucleotide
gtgctgcccaccgaccctgattccatgcgacttct

SEQ ID NO: 13496 - DNA, 35 bp, Artificial Sequence
  Synthetic oligonucleotide
gtggaacgcggtaatcggaatgctcatgtagttac

SEQ ID NO: 13497 - DNA, 38 bp, Artificial Sequence
  Synthetic oligonucleotide
gtgtccgtcagaggctgtgtgttggataaagtacatga

SEQ ID NO: 13498 - DNA, 35 bp, Artificial Sequence
  Synthetic oligonucleotide
tacaacatacgcagatgaaacgtgccatcaaataa

SEQ ID NO: 13499 - DNA, 36 bp, Artificial Sequence
  Synthetic oligonucleotide
tagcccccgccggacgttccttcgcttcaacaccca

SEQ ID NO: 13500 - DNA, 35 bp, Artificial Sequence
  Synthetic oligonucleotide
tcaccagtcatggccggggtatgagtctgagatgg

SEQ ID NO: 13501 - DNA, 35 bp, Artificial Sequence
  Synthetic oligonucleotide
tcactgccgtagatactccaccatacccaccgaac

SEQ ID NO: 13502 - DNA, 38 bp, Artificial Sequence
  Synthetic oligonucleotide
tcatggcacgaatgatatgtaccagacggacgatttga

SEQ ID NO: 13503 - DNA, 36 bp, Artificial Sequence
  Synthetic oligonucleotide
tctaacgccaccactagacgtattgtccacacctta

SEQ ID NO: 13504 - DNA, 35 bp, Artificial Sequence
  Synthetic oligonucleotide
tctgaccgcagtcccacaggaaacacattcccttc

SEQ ID NO: 13505 - DNA, 38 bp, Artificial Sequence
  Synthetic oligonucleotide
tctgccactgtcgaccgtgcgcaatctgacgtgggtga

SEQ ID NO: 13506 - DNA, 35 bp, Artificial Sequence
  Synthetic oligonucleotide
tgaccagccaggtgcgaaccagaaaatcgtagtac

SEQ ID NO: 13507 - DNA, 35 bp, Artificial Sequence
  Synthetic oligonucleotide
tgaccgacagggcatacgtatcgggtcgctatcaa

SEQ ID NO: 13508 - DNA, 37 bp, Artificial Sequence
  Synthetic oligonucleotide
tgacgaatgcgcagcactccaagtaaggttgtcatga

SEQ ID NO: 13509 - DNA, 36 bp, Artificial Sequence
  Synthetic oligonucleotide
tgcatggtagctattcctaatcaactgtggatatca

SEQ ID NO: 13510 - DNA, 38 bp, Artificial Sequence
  Synthetic oligonucleotide
tgccacacagaagatggctacttcctgtaacctagtga

SEQ ID NO: 13511 - DNA, 36 bp, Artificial Sequence
  Synthetic oligonucleotide
ttcgcacagtccggaaagctgccacacaagacatga

SEQ ID NO: 13512 - DNA, 36 bp, Artificial Sequence
  Synthetic oligonucleotide
ttgcgggaggaacattacggtggatagtcggttgaa

SEQ ID NO: 13513 - DNA, 36 bp, Artificial Sequence
  Synthetic oligonucleotide
aacgacgagtgaagtactgccgacgtcccatgtcta

SEQ ID NO: 13514 - DNA, 35 bp, Artificial Sequence
  Synthetic oligonucleotide
aacgcatacaccccgtcatctctatgcatatcatg

SEQ ID NO: 13515 - DNA, 36 bp, Artificial Sequence
  Synthetic oligonucleotide
acacaccgacgtaacagaacggccatttcgacgtca

SEQ ID NO: 13516 - DNA, 36 bp, Artificial Sequence
  Synthetic oligonucleotide
acacacgtccgactaccgaggcctcaacttggttga

SEQ ID NO: 13517 - DNA, 36 bp, Artificial Sequence
  Synthetic oligonucleotide
acacgccgtccatcgctccaaagccactaggtatca

SEQ ID NO: 13518 - DNA, 36 bp, Artificial Sequence
  Synthetic oligonucleotide
acactccagccggacacagatgcagtgcaccgtaca

SEQ ID NO: 13519 - DNA, 36 bp, Artificial Sequence
  Synthetic oligonucleotide
acatgctgcaatcagtaggtgttcggtaagatggaa

SEQ ID NO: 13520 - DNA, 37 bp, Artificial Sequence
  Synthetic oligonucleotide
acccacgcccccgatgcagtaggacctcacctatgga

SEQ ID NO: 13521 - DNA, 35 bp, Artificial Sequence
  Synthetic oligonucleotide
acctacgtccacggtatctaacgggtacgtatcct

SEQ ID NO: 13522 - DNA, 35 bp, Artificial Sequence
  Synthetic oligonucleotide
acctgccagcccgtcccgagagggcgccaatctat

SEQ ID NO: 13523 - DNA, 34 bp, Artificial Sequence
  Synthetic oligonucleotide
acgaggcacccgtatcccgtgaaagtggtttcag

SEQ ID NO: 13524 - DNA, 36 bp, Artificial Sequence
  Synthetic oligonucleotide
actgaccagtcggcattgctccaccactaccgttca

SEQ ID NO: 13525 - DNA, 37 bp, Artificial Sequence
  Synthetic oligonucleotide
actgtgcgaacagcaagatgactggaacattagatga

SEQ ID NO: 13526 - DNA, 36 bp, Artificial Sequence
  Synthetic oligonucleotide
attgcagaaggtcaggtggccaatacgagggatcca

SEQ ID NO: 13527 - DNA, 37 bp, Artificial Sequence
  Synthetic oligonucleotide
cctgagcatgtgcataagatacctccctaatggacga

SEQ ID NO: 13528 - DNA, 37 bp, Artificial Sequence
  Synthetic oligonucleotide
gacaacatgctcctcatcatctgatcgtaacgtacga

SEQ ID NO: 13529 - DNA, 38 bp, Artificial Sequence
  Synthetic oligonucleotide
gaccaagctcatgggtgtttgtcgaggccatttcatga

SEQ ID NO: 13530 - DNA, 35 bp, Artificial Sequence
  Synthetic oligonucleotide
gaccacgagccgacagttctacgtatagcaagctg

SEQ ID NO: 13531 - DNA, 35 bp, Artificial Sequence
  Synthetic oligonucleotide
gaccagacggcccggagcacaagagcacaggtctt

SEQ ID NO: 13532 - DNA, 38 bp, Artificial Sequence
  Synthetic oligonucleotide
gaccgcacggggctagaaagacgtaccgttttacgtga

SEQ ID NO: 13533 - DNA, 35 bp, Artificial Sequence
  Synthetic oligonucleotide
gacgaacgtgcggtgtactaggtatggtcgaatat

SEQ ID NO: 13534 - DNA, 36 bp, Artificial Sequence
  Synthetic oligonucleotide
gacgaccccgatactactcttagtcagccttaccta

SEQ ID NO: 13535 - DNA, 37 bp, Artificial Sequence
  Synthetic oligonucleotide
gacgccacaacgcggtccatggtgagacacctatcga

SEQ ID NO: 13536 - DNA, 37 bp, Artificial Sequence
  Synthetic oligonucleotide
gacgcgaagccccaggggtaggtagacgtactccaga

SEQ ID NO: 13537 - DNA, 35 bp, Artificial Sequence
  Synthetic oligonucleotide
gacggaaccagaacgtcacttttaggaacgacttg

SEQ ID NO: 13538 - DNA, 36 bp, Artificial Sequence
  Synthetic oligonucleotide
gactgccacaatctcatctcctcttcgacgcgttca

SEQ ID NO: 13539 - DNA, 35 bp, Artificial Sequence
  Synthetic oligonucleotide
gagccgccatgccggtatgaatagcaacatatacg

SEQ ID NO: 13540 - DNA, 38 bp, Artificial Sequence
  Synthetic oligonucleotide
gagcgaaccgaccgtagtggacaacaatgctagattga

SEQ ID NO: 13541 - DNA, 37 bp, Artificial Sequence
  Synthetic oligonucleotide
gagcgtaggcgatacgtacgcaagaattagaggtgga

SEQ ID NO: 13542 - DNA, 35 bp, Artificial Sequence
  Synthetic oligonucleotide
gatgcagaccgcgagttaagcaaaactgacatatg

SEQ ID NO: 13543 - DNA, 35 bp, Artificial Sequence
  Synthetic oligonucleotide
gatgccgccattcgtgcacactatcgctagcctgt

SEQ ID NO: 13544 - DNA, 35 bp, Artificial Sequence
  Synthetic oligonucleotide
gatggctcacacgtaggcatcagaatacggtccgt

SEQ ID NO: 13545 - DNA, 36 bp, Artificial Sequence
  Synthetic oligonucleotide
gcaacgcaggtggtccggaagagttaagcccttgca

SEQ ID NO: 13546 - DNA, 38 bp, Artificial Sequence
  Synthetic oligonucleotide
gcacaagcaagcgcaactggggtagtcacgcgccttga

SEQ ID NO: 13547 - DNA, 35 bp, Artificial Sequence
  Synthetic oligonucleotide
gcacagtctcctgtacatgaacctgcgctgtcgtg

SEQ ID NO: 13548 - DNA, 36 bp, Artificial Sequence
  Synthetic oligonucleotide
gcaccccatacagaccccgtgaatcacagttaataa

SEQ ID NO: 13549 - DNA, 36 bp, Artificial Sequence
  Synthetic oligonucleotide
gcactgtgccacgcgtggaaaaaaaaagggtcgcaa

SEQ ID NO: 13550 - DNA, 38 bp, Artificial Sequence
  Synthetic oligonucleotide
gcagaccatgcatggacggaactgtcgacttagactga

SEQ ID NO: 13551 - DNA, 38 bp, Artificial Sequence
  Synthetic oligonucleotide
gccaacgtagtgcgtgttccatcgggtgagccaaatga

SEQ ID NO: 13552 - DNA, 35 bp, Artificial Sequence
  Synthetic oligonucleotide
gccaacgttcagcacgagttactatgaagccctca

SEQ ID NO: 13553 - DNA, 37 bp, Artificial Sequence
  Synthetic oligonucleotide
gccaggagtatgggtgatgacggcctcactaccgtga

SEQ ID NO: 13554 - DNA, 36 bp, Artificial Sequence
  Synthetic oligonucleotide
gccccggatcacaggcaaccttagtccaaggctcta

SEQ ID NO: 13555 - DNA, 36 bp, Artificial Sequence
  Synthetic oligonucleotide
gcccgagaccgctgttgaaattttagtacatcggta

SEQ ID NO: 13556 - DNA, 36 bp, Artificial Sequence
  Synthetic oligonucleotide
gcgacgagaagaagtaaaatggaagctcttgaacga

SEQ ID NO: 13557 - DNA, 36 bp, Artificial Sequence
  Synthetic oligonucleotide
gtcgagtcacagacgattacaagcatgcaaagaaca

SEQ ID NO: 13558 - DNA, 35 bp, Artificial Sequence
  Synthetic oligonucleotide
gtgccaaagaggaccgtgagtcatatgtagaccta

SEQ ID NO: 13559 - DNA, 35 bp, Artificial Sequence
  Synthetic oligonucleotide
gttgcacgcatatcgccatggatgaaccgggtgta

SEQ ID NO: 13560 - DNA, 37 bp, Artificial Sequence
  Synthetic oligonucleotide
gttgcccgaacagaaggacggagcgacaattcaggga

SEQ ID NO: 13561 - DNA, 35 bp, Artificial Sequence
  Synthetic oligonucleotide
tacaccagtcgagcgatactaacccggtccccgaa

SEQ ID NO: 13562 - DNA, 36 bp, Artificial Sequence
  Synthetic oligonucleotide
taccgagcgacacggatgggtcgaacaaggtgggaa

SEQ ID NO: 13563 - DNA, 37 bp, Artificial Sequence
  Synthetic oligonucleotide
tacgacgcctgacgcaaaccgcatgaccgtcgtgtga

SEQ ID NO: 13564 - DNA, 35 bp, Artificial Sequence
  Synthetic oligonucleotide
tagtgccgccgccatcccctctagttctggtcttc

SEQ ID NO: 13565 - DNA, 36 bp, Artificial Sequence
  Synthetic oligonucleotide
tcaacgcacgtcgatcgaaccaggctgtggtaacca

SEQ ID NO: 13566 - DNA, 38 bp, Artificial Sequence
  Synthetic oligonucleotide
tcaacgccgaacagagtaggatcttggagagtccgtga

SEQ ID NO: 13567 - DNA, 36 bp, Artificial Sequence
  Synthetic oligonucleotide
tcagtgcgagcgcgagtgtctcatctttgacgggaa

SEQ ID NO: 13568 - DNA, 35 bp, Artificial Sequence
  Synthetic oligonucleotide
tccaacccccattacgattctatgccacgtaagta

SEQ ID NO: 13569 - DNA, 35 bp, Artificial Sequence
  Synthetic oligonucleotide
tccatagccggatggagcccaacacacacagccca

SEQ ID NO: 13570 - DNA, 38 bp, Artificial Sequence
  Synthetic oligonucleotide
tgacacgcaaagttggtgcgtagaggaaggacccatga

SEQ ID NO: 13571 - DNA, 37 bp, Artificial Sequence
  Synthetic oligonucleotide
tgcccaacgccgaccatgcattcgatgatccactcga

SEQ ID NO: 13572 - DNA, 37 bp, Artificial Sequence
  Synthetic oligonucleotide
tgcgaccgcccagtagctatcacccccgaaattcgga

SEQ ID NO: 13573 - DNA, 38 bp, Artificial Sequence
  Synthetic oligonucleotide
tgcgacggccgaacgtctataacggtatctcaacttga

SEQ ID NO: 13574 - DNA, 37 bp, Artificial Sequence
  Synthetic oligonucleotide
tgcgccgccaccgcgatcccaacgtcacatacgtcga

SEQ ID NO: 13575 - DNA, 37 bp, Artificial Sequence
  Synthetic oligonucleotide
tgtgcctcacacgccacaccatcgccttgactcacga

SEQ ID NO: 13576 - DNA, 37 bp, Artificial Sequence
  Synthetic oligonucleotide
tgtgcgggcgcatgtttatacgaggtcaatgcttcga

SEQ ID NO: 13577 - DNA, 38 bp, Artificial Sequence
  Synthetic oligonucleotide
ttgcccctcaactgtacattgataacctcctgacgtga

SEQ ID NO: 13578 - DNA, 38 bp, Artificial Sequence
  Synthetic oligonucleotide
aaccacacgtcgctccaacgaatactgcaccactgtga

SEQ ID NO: 13579 - DNA, 37 bp, Artificial Sequence
  Synthetic oligonucleotide
aaccatgggctaccgtccgacgcatcactgaccccga

SEQ ID NO: 13580 - DNA, 37 bp, Artificial Sequence
  Synthetic oligonucleotide
aacgacccgtccagggaagtgattcgcgcgctaggga

SEQ ID NO: 13581 - DNA, 37 bp, Artificial Sequence
  Synthetic oligonucleotide
aacgccgcactgtgagggttctcccgtcctagcagga

SEQ ID NO: 13582 - DNA, 38 bp, Artificial Sequence
  Synthetic oligonucleotide
aacgtgggcagagtaaaagccgtcgttacattgactga

SEQ ID NO: 13583 - DNA, 38 bp, Artificial Sequence
  Synthetic oligonucleotide
aatgcacgaagaacatcccacgtctcgatccgctgtga

SEQ ID NO: 13584 - DNA, 35 bp, Artificial Sequence
  Synthetic oligonucleotide
acaactcgcccaacagcatgcattcgttatatatg

SEQ ID NO: 13585 - DNA, 37 bp, Artificial Sequence
  Synthetic oligonucleotide
acacacggtcggagaagcagaatgctagtaatatcga

SEQ ID NO: 13586 - DNA, 38 bp, Artificial Sequence
  Synthetic oligonucleotide
acacccgcgctcaacgtttatcggaacgggttagctga

SEQ ID NO: 13587 - DNA, 36 bp, Artificial Sequence
  Synthetic oligonucleotide
acaccgcgaagggtctgataagacaggatgcaatta

SEQ ID NO: 13588 - DNA, 38 bp, Artificial Sequence
  Synthetic oligonucleotide
acacgagtggtgggtgtagtcgcagtgataagctctga

SEQ ID NO: 13589 - DNA, 36 bp, Artificial Sequence
  Synthetic oligonucleotide
acacgcctcgccagagaatgagacttcctcgaacaa

SEQ ID NO: 13590 - DNA, 35 bp, Artificial Sequence
  Synthetic oligonucleotide
acccgccccgagcgtcgaacatagaccaattccaa

SEQ ID NO: 13591 - DNA, 35 bp, Artificial Sequence
  Synthetic oligonucleotide
accgatgtcccaacatcgatgccgtcctttcggtc

SEQ ID NO: 13592 - DNA, 36 bp, Artificial Sequence
  Synthetic oligonucleotide
actgcaccgctcaagctaccttgtaatctacgtgta

SEQ ID NO: 13593 - DNA, 35 bp, Artificial Sequence
  Synthetic oligonucleotide
atcctacccagtcgtgacatctgaccccgaaatcc

SEQ ID NO: 13594 - DNA, 35 bp, Artificial Sequence
  Synthetic oligonucleotide
atcgcgcaccgcaagtgtgaacacccaagcctttc

SEQ ID NO: 13595 - DNA, 38 bp, Artificial Sequence
  Synthetic oligonucleotide
gaaccaggcacgacagtgataaggacgcgatagtctga

SEQ ID NO: 13596 - DNA, 37 bp, Artificial Sequence
  Synthetic oligonucleotide
gacaccacgctaaaagtgaacgttgccgggcttgtga

SEQ ID NO: 13597 - DNA, 36 bp, Artificial Sequence
  Synthetic oligonucleotide
gacaccgcacaggctagataaccactgtaggacgga

SEQ ID NO: 13598 - DNA, 36 bp, Artificial Sequence
  Synthetic oligonucleotide
gacacgtgtagtggacgtggactggtcgtgagcgga

SEQ ID NO: 13599 - DNA, 38 bp, Artificial Sequence
  Synthetic oligonucleotide
gacagggccactgtcaccccaccgtctttttactctga

SEQ ID NO: 13600 - DNA, 37 bp, Artificial Sequence
  Synthetic oligonucleotide
gaccaacaagatcatgtactgtcggataccacctaga

SEQ ID NO: 13601 - DNA, 36 bp, Artificial Sequence
  Synthetic oligonucleotide
gaccaacgcacaatacacgtgcatagacactggaaa

SEQ ID NO: 13602 - DNA, 36 bp, Artificial Sequence
  Synthetic oligonucleotide
gaccacgtgaagtcgagcaattcgaggtagcagtaa

SEQ ID NO: 13603 - DNA, 37 bp, Artificial Sequence
  Synthetic oligonucleotide
gaccagagcagacgatggataaacgtgctgtttgaga

SEQ ID NO: 13604 - DNA, 35 bp, Artificial Sequence
  Synthetic oligonucleotide
gacccaggtagtgggagggggaaagggctagtcaa

SEQ ID NO: 13605 - DNA, 35 bp, Artificial Sequence
  Synthetic oligonucleotide
gacgcaggctccagacgaaatttcgacggttgatc

SEQ ID NO: 13606 - DNA, 35 bp, Artificial Sequence
  Synthetic oligonucleotide
gacgtactgccctacattttcgactattgatagcc

SEQ ID NO: 13607 - DNA, 38 bp, Artificial Sequence
  Synthetic oligonucleotide
gactacaagtgcagatgaggggctaccaggctaggtga

SEQ ID NO: 13608 - DNA, 35 bp, Artificial Sequence
  Synthetic oligonucleotide
gactaccgggagcgaagcggcgcgtgtcacgtacg

SEQ ID NO: 13609 - DNA, 36 bp, Artificial Sequence
  Synthetic oligonucleotide
gactgacgcatcgaaaagcatcgagctagtggccga

SEQ ID NO: 13610 - DNA, 35 bp, Artificial Sequence
  Synthetic oligonucleotide
gactgctaggagttacccactcgttatgcccttaa

SEQ ID NO: 13611 - DNA, 35 bp, Artificial Sequence
  Synthetic oligonucleotide
gagcgcacggggagtagaagtggtctcagaggagt

SEQ ID NO: 13612 - DNA, 36 bp, Artificial Sequence
  Synthetic oligonucleotide
gagcgggaggaccagaaggcgttggggagtctagca

SEQ ID NO: 13613 - DNA, 37 bp, Artificial Sequence
  Synthetic oligonucleotide
gaggggcgagatcggtgcgattggcctcatgctatga

SEQ ID NO: 13614 - DNA, 35 bp, Artificial Sequence
  Synthetic oligonucleotide
gatgcgctaggtagcaaataaaaggcgtaattggt

SEQ ID NO: 13615 - DNA, 35 bp, Artificial Sequence
  Synthetic oligonucleotide
gcaccacctcactgcgagtccgactatccctcatt

SEQ ID NO: 13616 - DNA, 37 bp, Artificial Sequence
  Synthetic oligonucleotide
gcaccgtgcacggacgatgctggattcagtcaagtga

SEQ ID NO: 13617 - DNA, 35 bp, Artificial Sequence
  Synthetic oligonucleotide
gcactcgccgcaacattcgttttactgtaatacgg

SEQ ID NO: 13618 - DNA, 35 bp, Artificial Sequence
  Synthetic oligonucleotide
gcaggggggtcaatgccagatcccaggtcacgtta

SEQ ID NO: 13619 - DNA, 37 bp, Artificial Sequence
  Synthetic oligonucleotide
gcagtaccagaagcagataggcgagttaaccgtacga

SEQ ID NO: 13620 - DNA, 38 bp, Artificial Sequence
  Synthetic oligonucleotide
gccaacgcaaggaagtacacagccagtattttacctga

SEQ ID NO: 13621 - DNA, 36 bp, Artificial Sequence
  Synthetic oligonucleotide
gccacaacacgcagtatacccaatacgttttcaata

SEQ ID NO: 13622 - DNA, 38 bp, Artificial Sequence
  Synthetic oligonucleotide
gccacccatccacgaggataacaaatgactctccctga

SEQ ID NO: 13623 - DNA, 36 bp, Artificial Sequence
  Synthetic oligonucleotide
gccacgcacgcagtaaaggagtagttttgacgttca

SEQ ID NO: 13624 - DNA, 38 bp, Artificial Sequence
  Synthetic oligonucleotide
gccacgggcgggaagtagattgacctccatcccaatga

SEQ ID NO: 13625 - DNA, 36 bp, Artificial Sequence
  Synthetic oligonucleotide
gcccaggccagaaagacccccagaccgtaaccctga

SEQ ID NO: 13626 - DNA, 37 bp, Artificial Sequence
  Synthetic oligonucleotide
gccggttcaagccgtaactgagtagggccaacgacga

SEQ ID NO: 13627 - DNA, 36 bp, Artificial Sequence
  Synthetic oligonucleotide
gcgatgtagcagtgcgtaataacgcagatttggtaa

SEQ ID NO: 13628 - DNA, 36 bp, Artificial Sequence
  Synthetic oligonucleotide
ggaacgtgggaccgttacaagactgttgtttgcaca

SEQ ID NO: 13629 - DNA, 36 bp, Artificial Sequence
  Synthetic oligonucleotide
ggtggggcacaagcctcagctgtgacagtttatgca

SEQ ID NO: 13630 - DNA, 37 bp, Artificial Sequence
  Synthetic oligonucleotide
gtgaccgcatctagtcgggagccggacatccctgaga

SEQ ID NO: 13631 - DNA, 35 bp, Artificial Sequence
  Synthetic oligonucleotide
gtgcaaacgagaggttgggttgcatacgagtttgg

SEQ ID NO: 13632 - DNA, 35 bp, Artificial Sequence
  Synthetic oligonucleotide
gtgcaccgaagcatgcagcttaaggaaactgtcgt

SEQ ID NO: 13633 - DNA, 36 bp, Artificial Sequence
  Synthetic oligonucleotide
gtgcacgcaacagactcgacgtcagtgccgatcgta

SEQ ID NO: 13634 - DNA, 35 bp, Artificial Sequence
  Synthetic oligonucleotide
taagccgcagttgagcgatggtgaaacggctacgg

SEQ ID NO: 13635 - DNA, 38 bp, Artificial Sequence
  Synthetic oligonucleotide
tacacaacgctaggtttacgaaaaactgcatgtactga

SEQ ID NO: 13636 - DNA, 38 bp, Artificial Sequence
  Synthetic oligonucleotide
tacacgcggggctagtaggttaatcatgcatatactga

SEQ ID NO: 13637 - DNA, 35 bp, Artificial Sequence
  Synthetic oligonucleotide
tacattgcgaacagcatctacccattctcaagcca

SEQ ID NO: 13638 - DNA, 36 bp, Artificial Sequence
  Synthetic oligonucleotide
taggacgggtccgcagttaagacctacaaagattga

SEQ ID NO: 13639 - DNA, 36 bp, Artificial Sequence
  Synthetic oligonucleotide
tcaatgctcagtccaagattagagtcgtggggaata

SEQ ID NO: 13640 - DNA, 35 bp, Artificial Sequence
  Synthetic oligonucleotide
tcacggagcaagctatgccgcagtggcaggatcct

SEQ ID NO: 13641 - DNA, 35 bp, Artificial Sequence
  Synthetic oligonucleotide
tcagtacgcacatgtgttcgtcgtccaggaaatcg

SEQ ID NO: 13642 - DNA, 35 bp, Artificial Sequence
  Synthetic oligonucleotide
tccaccggaaggggggacattacgcaaggagagtg

SEQ ID NO: 13643 - DNA, 37 bp, Artificial Sequence
  Synthetic oligonucleotide
tccgcacagtcgtagtgtctggggacactaggcttga

SEQ ID NO: 13644 - DNA, 35 bp, Artificial Sequence
  Synthetic oligonucleotide
tccgccgccgagggagcttagtactggaccctaac

SEQ ID NO: 13645 - DNA, 38 bp, Artificial Sequence
  Synthetic oligonucleotide
tccgcgagcagggaacggctgcgcaaatgtctgattga

SEQ ID NO: 13646 - DNA, 35 bp, Artificial Sequence
  Synthetic oligonucleotide
tcggggtgaaggctggcatcgtggcgggtatttaa

SEQ ID NO: 13647 - DNA, 38 bp, Artificial Sequence
  Synthetic oligonucleotide
tgacaacggtggagtatgcatggaggccaatacgatga

SEQ ID NO: 13648 - DNA, 36 bp, Artificial Sequence
  Synthetic oligonucleotide
tgacgtgaggcaacgtggtcctgaggcttcatggta

SEQ ID NO: 13649 - DNA, 38 bp, Artificial Sequence
  Synthetic oligonucleotide
tgagcaacccaagtagtgtctcggccaccttaggctga

SEQ ID NO: 13650 - DNA, 35 bp, Artificial Sequence
  Synthetic oligonucleotide
tgccaacgcagaccccccctaaaacacgctgtgaa

SEQ ID NO: 13651 - DNA, 35 bp, Artificial Sequence
  Synthetic oligonucleotide
tgcccacaacagaatgtacgcctggacctgggagg

SEQ ID NO: 13652 - DNA, 36 bp, Artificial Sequence
  Synthetic oligonucleotide
tgcccgctaagacccccgagatcagagccgcagaga

SEQ ID NO: 13653 - DNA, 37 bp, Artificial Sequence
  Synthetic oligonucleotide
tgcgaacgcgccgcctatgtcatgagaccagcaacga

SEQ ID NO: 13654 - DNA, 38 bp, Artificial Sequence
  Synthetic oligonucleotide
tgcgagacgcgagcaacggtactaggtgtgcactatga

SEQ ID NO: 13655 - DNA, 35 bp, Artificial Sequence
  Synthetic oligonucleotide
ttcacagccagtcagccgtcgttaagcgggaaacg

SEQ ID NO: 13656 - DNA, 38 bp, Artificial Sequence
  Synthetic oligonucleotide
ttcgcagagccttgggtactccgacgcaaccagcttga

SEQ ID NO: 13657 - DNA, 36 bp, Artificial Sequence
  Synthetic oligonucleotide
ttgatcatgcagcatattaccgcttcacttttctta

SEQ ID NO: 13658 - DNA, 37 bp, Artificial Sequence
  Synthetic oligonucleotide
aaaacagcacacaagccaataagtaagatcatgcgga

SEQ ID NO: 13659 - DNA, 36 bp, Artificial Sequence
  Synthetic oligonucleotide
aacacgcagtgtgaagtcgaaaggtggacgcactta

SEQ ID NO: 13660 - DNA, 35 bp, Artificial Sequence
  Synthetic oligonucleotide
aacatccgtccagccgcgcaattagcgtatcgtcc

SEQ ID NO: 13661 - DNA, 35 bp, Artificial Sequence
  Synthetic oligonucleotide
aactgccaccccgtagactcactgcgctaccctta

SEQ ID NO: 13662 - DNA, 36 bp, Artificial Sequence
  Synthetic oligonucleotide
acaaacgcgaatgggcgtgctatgcggttagcaaaa

SEQ ID NO: 13663 - DNA, 36 bp, Artificial Sequence
  Synthetic oligonucleotide
acacacccagtgctcattcggctgttcttagcacaa

SEQ ID NO: 13664 - DNA, 37 bp, Artificial Sequence
  Synthetic oligonucleotide
acacagtggcgaagagatgtcaaggtgatccccagga

SEQ ID NO: 13665 - DNA, 36 bp, Artificial Sequence
  Synthetic oligonucleotide
acaccagccaggacacgaacctcaatacaacatcta

SEQ ID NO: 13666 - DNA, 38 bp, Artificial Sequence
  Synthetic oligonucleotide
acacccacaagaagggacagttcctcaggcttttatga

SEQ ID NO: 13667 - DNA, 35 bp, Artificial Sequence
  Synthetic oligonucleotide
acatacacccgcgacgatcgggagattcgttgcga

SEQ ID NO: 13668 - DNA, 35 bp, Artificial Sequence
  Synthetic oligonucleotide
acatcacgcagacatcttcaatagactagctagaa

SEQ ID NO: 13669 - DNA, 36 bp, Artificial Sequence
  Synthetic oligonucleotide
accaacaccgacgccacataaggcagtcgctatcaa

SEQ ID NO: 13670 - DNA, 37 bp, Artificial Sequence
  Synthetic oligonucleotide
accacacgactatcgtacacgagtgttaactgctgga

SEQ ID NO: 13671 - DNA, 36 bp, Artificial Sequence
  Synthetic oligonucleotide
accacccgccatgttcttgcatttctaccttaccta

SEQ ID NO: 13672 - DNA, 36 bp, Artificial Sequence
  Synthetic oligonucleotide
accactgccatgtctcgtgccctcgtgcgatcccta

SEQ ID NO: 13673 - DNA, 36 bp, Artificial Sequence
  Synthetic oligonucleotide
acgaagccgacaccgagtaaagaccagtagggctga

SEQ ID NO: 13674 - DNA, 35 bp, Artificial Sequence
  Synthetic oligonucleotide
atcagccgcggctcacgaagagcatgccaaaggat

SEQ ID NO: 13675 - DNA, 37 bp, Artificial Sequence
  Synthetic oligonucleotide
atcgacgccgcgcacaggctagatgagcacattagga

SEQ ID NO: 13676 - DNA, 36 bp, Artificial Sequence
  Synthetic oligonucleotide
atctcgccacaggttgacggactacagaaacacaca

SEQ ID NO: 13677 - DNA, 35 bp, Artificial Sequence
  Synthetic oligonucleotide
atgccccagcatacggacttggtagcattgcagac

SEQ ID NO: 13678 - DNA, 37 bp, Artificial Sequence
  Synthetic oligonucleotide
atgcccgctgtggagagggatcgctcacttatgttga

SEQ ID NO: 13679 - DNA, 36 bp, Artificial Sequence
  Synthetic oligonucleotide
cttgtcgcaggggctggcaacaaagggcgattttca

SEQ ID NO: 13680 - DNA, 36 bp, Artificial Sequence
  Synthetic oligonucleotide
gaacgcacatgccgcatgtgtttccgactccatgta

SEQ ID NO: 13681 - DNA, 34 bp, Artificial Sequence
  Synthetic oligonucleotide
gaacgcatccctgcagatgtacgtactcagctgg

SEQ ID NO: 13682 - DNA, 37 bp, Artificial Sequence
  Synthetic oligonucleotide
gaatccgcgaagaggcacactgggcacaggtaactga

SEQ ID NO: 13683 - DNA, 36 bp, Artificial Sequence
  Synthetic oligonucleotide
gacacagtcgctctgcagggctaaccactctgacaa

SEQ ID NO: 13684 - DNA, 35 bp, Artificial Sequence
  Synthetic oligonucleotide
gacacatggcaggactgcgagcggtagcattactc

SEQ ID NO: 13685 - DNA, 37 bp, Artificial Sequence
  Synthetic oligonucleotide
gacaccagtctcgcccaccagtcacagttctccacga

SEQ ID NO: 13686 - DNA, 37 bp, Artificial Sequence
  Synthetic oligonucleotide
gacacgccaatgacggtgtctgctaagtctctcttga

SEQ ID NO: 13687 - DNA, 37 bp, Artificial Sequence
  Synthetic oligonucleotide
gacacgccaatggttcgtggcatgcatcttagcttga

SEQ ID NO: 13688 - DNA, 36 bp, Artificial Sequence
  Synthetic oligonucleotide
gacagaagccgccatgtacgaatcgagtggtgcaga

SEQ ID NO: 13689 - DNA, 37 bp, Artificial Sequence
  Synthetic oligonucleotide
gaccacggaacgaaaaatggtagactgccttcttcga

SEQ ID NO: 13690 - DNA, 35 bp, Artificial Sequence
  Synthetic oligonucleotide
gaccagagtgcaggatgtgggatcactctagtatg

SEQ ID NO: 13691 - DNA, 37 bp, Artificial Sequence
  Synthetic oligonucleotide
gacgaaacgccgagtggacgtatagtgttatcggaga

SEQ ID NO: 13692 - DNA, 38 bp, Artificial Sequence
  Synthetic oligonucleotide
gacgagtagccacgatatgtcacgacgacggtgtgtga

SEQ ID NO: 13693 - DNA, 37 bp, Artificial Sequence
  Synthetic oligonucleotide
gacgcagacgccggtgtctcacgtgaggagtgcaaga

SEQ ID NO: 13694 - DNA, 36 bp, Artificial Sequence
  Synthetic oligonucleotide
gacgccgaagcagttaaatgatcaacgtgacggtga

SEQ ID NO: 13695 - DNA, 35 bp, Artificial Sequence
  Synthetic oligonucleotide
gacgcgagagggtatcatgggggcagtcaactcat

SEQ ID NO: 13696 - DNA, 35 bp, Artificial Sequence
  Synthetic oligonucleotide
gagaccccgccaaggcaactaaacggaccagcatg

SEQ ID NO: 13697 - DNA, 36 bp, Artificial Sequence
  Synthetic oligonucleotide
gagccgaacggtaccttgggtggtcgacggttatca

SEQ ID NO: 13698 - DNA, 35 bp, Artificial Sequence
  Synthetic oligonucleotide
gagtgtccgcgaaagagggagatactgtcattggt

SEQ ID NO: 13699 - DNA, 35 bp, Artificial Sequence
  Synthetic oligonucleotide
gcacaacggtcaagcataattggagacgacggaag

SEQ ID NO: 13700 - DNA, 35 bp, Artificial Sequence
  Synthetic oligonucleotide
gcacccaggcggtacagaagctggtcgacaccgta

SEQ ID NO: 13701 - DNA, 35 bp, Artificial Sequence
  Synthetic oligonucleotide
gcacgaccaggtgaacgtacaaataacagtttgcg

SEQ ID NO: 13702 - DNA, 38 bp, Artificial Sequence
  Synthetic oligonucleotide
gccaagtgaggccgtgctgcaggaatcccggagcgtga

SEQ ID NO: 13703 - DNA, 35 bp, Artificial Sequence
  Synthetic oligonucleotide
gccaccccagtgcacgcaaaagctctagatggctc

SEQ ID NO: 13704 - DNA, 37 bp, Artificial Sequence
  Synthetic oligonucleotide
gccatcacagcagggcatcaacgtttgccaacggcga

SEQ ID NO: 13705 - DNA, 37 bp, Artificial Sequence
  Synthetic oligonucleotide
gcccaccccagtctgtgctataccgacgccgtccgga

SEQ ID NO: 13706 - DNA, 38 bp, Artificial Sequence
  Synthetic oligonucleotide
gcccacgtcgcagtaacccgtccttgagaaggatatga

SEQ ID NO: 13707 - DNA, 35 bp, Artificial Sequence
  Synthetic oligonucleotide
gccgcaacagccagttcgctcttcgttccaaacca

SEQ ID NO: 13708 - DNA, 35 bp, Artificial Sequence
  Synthetic oligonucleotide
gcctaccccgtctgagtggcgcacttagcaacact

SEQ ID NO: 13709 - DNA, 36 bp, Artificial Sequence
  Synthetic oligonucleotide
gcgcatcacagttagctagctgacgagaagttgaca

SEQ ID NO: 13710 - DNA, 35 bp, Artificial Sequence
  Synthetic oligonucleotide
gctacgcaagggctgttatacatgctaacccattc

SEQ ID NO: 13711 - DNA, 36 bp, Artificial Sequence
  Synthetic oligonucleotide
gtcaaagccgaacaagataggggaaacgattggtta

SEQ ID NO: 13712 - DNA, 36 bp, Artificial Sequence
  Synthetic oligonucleotide
gtcgaccccccacccgacttgagcttcgacgacgaa

SEQ ID NO: 13713 - DNA, 38 bp, Artificial Sequence
  Synthetic oligonucleotide
gtcgcaaaccgccaaacgggtactaggtatcctgctga

SEQ ID NO: 13714 - DNA, 35 bp, Artificial Sequence
  Synthetic oligonucleotide
gtgacatccggtcagtcatcacgacaaatcatttg

SEQ ID NO: 13715 - DNA, 37 bp, Artificial Sequence
  Synthetic oligonucleotide
gtgtcgacaacaattagatcacgtactgtattaacga

SEQ ID NO: 13716 - DNA, 36 bp, Artificial Sequence
  Synthetic oligonucleotide
gtgtgcaggccgcccactccgttacagtgcccttca

SEQ ID NO: 13717 - DNA, 37 bp, Artificial Sequence
  Synthetic oligonucleotide
taatgtgccgcaaccaacacaagggaagtcctcctga

SEQ ID NO: 13718 - DNA, 37 bp, Artificial Sequence
  Synthetic oligonucleotide
tacaaccgacgacacatctggtgcggcctcccgttga

SEQ ID NO: 13719 - DNA, 34 bp, Artificial Sequence
  Synthetic oligonucleotide
tacacacagccctgtcatagcagcagacactcga

SEQ ID NO: 13720 - DNA, 36 bp, Artificial Sequence
  Synthetic oligonucleotide
tacaccccgacaagtgaagtgcacgtgtcgtatcta

SEQ ID NO: 13721 - DNA, 35 bp, Artificial Sequence
  Synthetic oligonucleotide
tacatagcctcgccctatcaaccgaactttgaagg

SEQ ID NO: 13722 - DNA, 37 bp, Artificial Sequence
  Synthetic oligonucleotide
tacgacgaggtaccaagtgtgtaatattcgttaagga

SEQ ID NO: 13723 - DNA, 37 bp, Artificial Sequence
  Synthetic oligonucleotide
tacgcaacatgattgtcagaaccaattgacacaagga

SEQ ID NO: 13724 - DNA, 36 bp, Artificial Sequence
  Synthetic oligonucleotide
tacgccccaccacatagattgcaagccagtctatga

SEQ ID NO: 13725 - DNA, 35 bp, Artificial Sequence
  Synthetic oligonucleotide
tcaagcacacacgcccaacgaaggacgaacggtta

SEQ ID NO: 13726 - DNA, 37 bp, Artificial Sequence
  Synthetic oligonucleotide
tcaatgcaccgctccgaggttatggccgtgggatgga

SEQ ID NO: 13727 - DNA, 35 bp, Artificial Sequence
  Synthetic oligonucleotide
tcacaggcgaagcagagtctcccgtcccaacgaga

SEQ ID NO: 13728 - DNA, 35 bp, Artificial Sequence
  Synthetic oligonucleotide
tcaccgcctatcaggtgacacggggcaaggtttgt

SEQ ID NO: 13729 - DNA, 34 bp, Artificial Sequence
  Synthetic oligonucleotide
tcacgcacaatggaagcattttataggacgtaaa

SEQ ID NO: 13730 - DNA, 38 bp, Artificial Sequence
  Synthetic oligonucleotide
tgactagcggcagtccctcaacatggccgtccctttta

SEQ ID NO: 13731 - DNA, 36 bp, Artificial Sequence
  Synthetic oligonucleotide
tgatcacgcggggggatggtggcctgttggcgctaa

SEQ ID NO: 13732 - DNA, 38 bp, Artificial Sequence
  Synthetic oligonucleotide
tgccaacggggaaggcacaagtagaaggtcgaccgtga

SEQ ID NO: 13733 - DNA, 35 bp, Artificial Sequence
  Synthetic oligonucleotide
tgtagcgcaagacccccagacagtccacgcggata

SEQ ID NO: 13734 - DNA, 36 bp, Artificial Sequence
  Synthetic oligonucleotide
tgtgcgagctcacctcttaacgagagcacaatgaaa

SEQ ID NO: 13735 - DNA, 36 bp, Artificial Sequence
  Synthetic oligonucleotide
ttcagcaaccggcatgcaacgtccgcattacaccta

SEQ ID NO: 13736 - DNA, 35 bp, Artificial Sequence
  Synthetic oligonucleotide
aacaccgaccagactgctgatctgcgacgaagtat

SEQ ID NO: 13737 - DNA, 35 bp, Artificial Sequence
  Synthetic oligonucleotide
aacacgtgtaacaagcaggggatcgccattaacct

SEQ ID NO: 13738 - DNA, 35 bp, Artificial Sequence
  Synthetic oligonucleotide
aacgcgggggtgccgaaacaggacatacggggatc

SEQ ID NO: 13739 - DNA, 35 bp, Artificial Sequence
  Synthetic oligonucleotide
aagcccgcccccgacactaaacattatacctcgca

SEQ ID NO: 13740 - DNA, 35 bp, Artificial Sequence
  Synthetic oligonucleotide
aatgcgcccacaagacgttataatgcgatttacgt

SEQ ID NO: 13741 - DNA, 38 bp, Artificial Sequence
  Synthetic oligonucleotide
acacacagcaaatacgcacttgcatcatccccagttga

SEQ ID NO: 13742 - DNA, 38 bp, Artificial Sequence
  Synthetic oligonucleotide
acaccctcgatcccatactcgcccgtcgcattaagtga

SEQ ID NO: 13743 - DNA, 37 bp, Artificial Sequence
  Synthetic oligonucleotide
acacgcacatgccttgaaggacagcagaccacacgga

SEQ ID NO: 13744 - DNA, 37 bp, Artificial Sequence
  Synthetic oligonucleotide
acatcggggagggcgttaaagaacgtactaaaccaga

SEQ ID NO: 13745 - DNA, 38 bp, Artificial Sequence
  Synthetic oligonucleotide
acatgccgcaggaactcgtatgttcgaggaagccatga

SEQ ID NO: 13746 - DNA, 35 bp, Artificial Sequence
  Synthetic oligonucleotide
accagcacagcacggcatcaccttccttacatgaa

SEQ ID NO: 13747 - DNA, 28 bp, Artificial Sequence
  Synthetic oligonucleotide
accgagacgcaggacatactaatggtga

SEQ ID NO: 13748 - DNA, 38 bp, Artificial Sequence
  Synthetic oligonucleotide
accgccagaccgcatgagtagtagggcagtacgtttga

SEQ ID NO: 13749 - DNA, 36 bp, Artificial Sequence
  Synthetic oligonucleotide
acgccgcaagccgtgattcccagtactcatgctaca

SEQ ID NO: 13750 - DNA, 35 bp, Artificial Sequence
  Synthetic oligonucleotide
atcaccatcgcaggtggcacaattcatcgagctcc

SEQ ID NO: 13751 - DNA, 35 bp, Artificial Sequence
  Synthetic oligonucleotide
atgcaaccagcgctgtacagcaagactgctacata

SEQ ID NO: 13752 - DNA, 37 bp, Artificial Sequence
  Synthetic oligonucleotide
atgcaccaccatcgatctagctatccgtcatcacgga

SEQ ID NO: 13753 - DNA, 36 bp, Artificial Sequence
  Synthetic oligonucleotide
ccaacggtacgagatggcgtagtaaaagcacgaaga

SEQ ID NO: 13754 - DNA, 36 bp, Artificial Sequence
  Synthetic oligonucleotide
gaaccgcaactgagtccaggcagttaaaagcggaaa

SEQ ID NO: 13755 - DNA, 38 bp, Artificial Sequence
  Synthetic oligonucleotide
gaatcgcgaggatacgtgcagtcggatttcttcactga

SEQ ID NO: 13756 - DNA, 37 bp, Artificial Sequence
  Synthetic oligonucleotide
gacaagccagcacctagcgctatctacacccaccgga

SEQ ID NO: 13757 - DNA, 36 bp, Artificial Sequence
  Synthetic oligonucleotide
gacacctaggattggtaaatcgcggtgcttctacaa

SEQ ID NO: 13758 - DNA, 35 bp, Artificial Sequence
  Synthetic oligonucleotide
gacacgccgcattgacaagaagaggacaaagggtt

SEQ ID NO: 13759 - DNA, 37 bp, Artificial Sequence
  Synthetic oligonucleotide
gacacgccggtcgtgcagttcaacatagtctgtttga

SEQ ID NO: 13760 - DNA, 35 bp, Artificial Sequence
  Synthetic oligonucleotide
gacatccggcacatactcctgcgagctacactcat

SEQ ID NO: 13761 - DNA, 38 bp, Artificial Sequence
  Synthetic oligonucleotide
gacatggggcaggccttgagatatggacgcgggtgtga

SEQ ID NO: 13762 - DNA, 37 bp, Artificial Sequence
  Synthetic oligonucleotide
gaccaccgccgttgttctgccgatcagtgccccacga

SEQ ID NO: 13763 - DNA, 35 bp, Artificial Sequence
  Synthetic oligonucleotide
gacgaccgttgctaatttttcacagcgcaatgtcg

SEQ ID NO: 13764 - DNA, 36 bp, Artificial Sequence
  Synthetic oligonucleotide
gacgagtagtcgtcacgttatgaaagcatggtttga

SEQ ID NO: 13765 - DNA, 37 bp, Artificial Sequence
  Synthetic oligonucleotide
gagtgcatcggttgtggtcaattgcagctctcgtcga

SEQ ID NO: 13766 - DNA, 35 bp, Artificial Sequence
  Synthetic oligonucleotide
gagtgccggccgagatcactgctacaccttcgatt

SEQ ID NO: 13767 - DNA, 35 bp, Artificial Sequence
  Synthetic oligonucleotide
gatacagccgcagcactggcgaatgagctatatac

SEQ ID NO: 13768 - DNA, 36 bp, Artificial Sequence
  Synthetic oligonucleotide
gatcgctgagtgccaacagaaccattggagggtgga

SEQ ID NO: 13769 - DNA, 35 bp, Artificial Sequence
  Synthetic oligonucleotide
gatgccggatatgcaggctgctagggaaggctaac

SEQ ID NO: 13770 - DNA, 38 bp, Artificial Sequence
  Synthetic oligonucleotide
gatgcggaacgtgcgccagtaaagtcgcatagttgtga

SEQ ID NO: 13771 - DNA, 38 bp, Artificial Sequence
  Synthetic oligonucleotide
gcaaccggtggaacgccagttcacactgttattggtga

SEQ ID NO: 13772 - DNA, 38 bp, Artificial Sequence
  Synthetic oligonucleotide
gcacaactcggaagattgcgcgaaggatcagggcgtga

SEQ ID NO: 13773 - DNA, 35 bp, Artificial Sequence
  Synthetic oligonucleotide
gcacacagcccgatggtatcgaattgaagtccaac

SEQ ID NO: 13774 - DNA, 36 bp, Artificial Sequence
  Synthetic oligonucleotide
gcaccagtgcgaagtagcaggggaggcacgattcta

SEQ ID NO: 13775 - DNA, 37 bp, Artificial Sequence
  Synthetic oligonucleotide
gccaacggactggaacaggggattccgactgccgaga

SEQ ID NO: 13776 - DNA, 36 bp, Artificial Sequence
  Synthetic oligonucleotide
gccaagcaacaagatagtcgccagcgcttgacgaga

SEQ ID NO: 13777 - DNA, 37 bp, Artificial Sequence
  Synthetic oligonucleotide
gccccaccacagtcgctaccgtagttttgtagcgaga

SEQ ID NO: 13778 - DNA, 37 bp, Artificial Sequence
  Synthetic oligonucleotide
gcccgaccacggtttcaaagactgtactctctgttga

SEQ ID NO: 13779 - DNA, 38 bp, Artificial Sequence
  Synthetic oligonucleotide
gcccgctgagctatatcacacactacttccttcgatga

SEQ ID NO: 13780 - DNA, 35 bp, Artificial Sequence
  Synthetic oligonucleotide
gccggagggaggaaattagataagattttggccgg

SEQ ID NO: 13781 - DNA, 36 bp, Artificial Sequence
  Synthetic oligonucleotide
gcctgtacccacgcgatgagtgaccatgcgagatca

SEQ ID NO: 13782 - DNA, 35 bp, Artificial Sequence
  Synthetic oligonucleotide
gcgaagcccacttcctcttcgacattggactgtat

SEQ ID NO: 13783 - DNA, 35 bp, Artificial Sequence
  Synthetic oligonucleotide
gcgagagagcgctcggtcgcaaaataggtacattt

SEQ ID NO: 13784 - DNA, 35 bp, Artificial Sequence
  Synthetic oligonucleotide
gcgatagccgagtttgctgtggcgaaggatacatt

SEQ ID NO: 13785 - DNA, 37 bp, Artificial Sequence
  Synthetic oligonucleotide
gctcacccaagccacaactgatccacaccttgggtga

SEQ ID NO: 13786 - DNA, 38 bp, Artificial Sequence
  Synthetic oligonucleotide
gctgagacgccaaggttgagcgttcatggtaagtgtga

SEQ ID NO: 13787 - DNA, 37 bp, Artificial Sequence
  Synthetic oligonucleotide
gctggtggcacacacagatgcataatgatcaagacga

SEQ ID NO: 13788 - DNA, 36 bp, Artificial Sequence
  Synthetic oligonucleotide
ggatactcaggcatgtatacgaaatacttcaacgca

SEQ ID NO: 13789 - DNA, 37 bp, Artificial Sequence
  Synthetic oligonucleotide
gggccataggtagctctcgcgttagtgcgggatgaga

SEQ ID NO: 13790 - DNA, 38 bp, Artificial Sequence
  Synthetic oligonucleotide
gtacccaaccagtcgtttgagatccaggcccacgttga

SEQ ID NO: 13791 - DNA, 38 bp, Artificial Sequence
  Synthetic oligonucleotide
gtcacgacccccgggaaagcgaaccaaggcatacttga

SEQ ID NO: 13792 - DNA, 38 bp, Artificial Sequence
  Synthetic oligonucleotide
gtggcaaccgaggcccgctgtgatagtagagtaagtga

SEQ ID NO: 13793 - DNA, 38 bp, Artificial Sequence
  Synthetic oligonucleotide
taacgcgacgactgcagaaagacgatactcccaagtga

SEQ ID NO: 13794 - DNA, 37 bp, Artificial Sequence
  Synthetic oligonucleotide
taatccagcccacacggacgtggtgacgatctgagga

SEQ ID NO: 13795 - DNA, 35 bp, Artificial Sequence
  Synthetic oligonucleotide
taccagccacaggagcgtataagtaccatgttgtg

SEQ ID NO: 13796 - DNA, 35 bp, Artificial Sequence
  Synthetic oligonucleotide
tacccaccccgcactattcctataacgatcaactt

SEQ ID NO: 13797 - DNA, 35 bp, Artificial Sequence
  Synthetic oligonucleotide
tacccgccactcgcaggacctttctggacgcagga

SEQ ID NO: 13798 - DNA, 36 bp, Artificial Sequence
  Synthetic oligonucleotide
tatgcccgcccgctcccgcactagacgtccctgcta

SEQ ID NO: 13799 - DNA, 36 bp, Artificial Sequence
  Synthetic oligonucleotide
tcaacaagcggacacgtgactctagcggttagagga

SEQ ID NO: 13800 - DNA, 36 bp, Artificial Sequence
  Synthetic oligonucleotide
tcaatcaaggcgcacgtcgatttcgaccatagggca

SEQ ID NO: 13801 - DNA, 36 bp, Artificial Sequence
  Synthetic oligonucleotide
tcacacagggactgtaccatatggacgagagccgca

SEQ ID NO: 13802 - DNA, 36 bp, Artificial Sequence
  Synthetic oligonucleotide
tcacccagagcggatacatgcgacaggtcggctcaa

SEQ ID NO: 13803 - DNA, 38 bp, Artificial Sequence
  Synthetic oligonucleotide
tcaccgcgagacgttctgcgttttagcacctttgctga

SEQ ID NO: 13804 - DNA, 35 bp, Artificial Sequence
  Synthetic oligonucleotide
tcagacgcagacctcctctggtactgcatacattg

SEQ ID NO: 13805 - DNA, 37 bp, Artificial Sequence
  Synthetic oligonucleotide
tcagtcacaccgtgcaatcgacccaatcttccaagga

SEQ ID NO: 13806 - DNA, 38 bp, Artificial Sequence
  Synthetic oligonucleotide
tcatgcccgcagataaggtcagcagagaggagtcgtga

SEQ ID NO: 13807 - DNA, 35 bp, Artificial Sequence
  Synthetic oligonucleotide
tcatgctactgtcccaaaaggtagtcccaatcgac

SEQ ID NO: 13808 - DNA, 35 bp, Artificial Sequence
  Synthetic oligonucleotide
tccactgccgccgagttgaatgcgtggacctttta

SEQ ID NO: 13809 - DNA, 36 bp, Artificial Sequence
  Synthetic oligonucleotide
tgacaaacagagcagtgaaaacggatcagacgaaaa

SEQ ID NO: 13810 - DNA, 36 bp, Artificial Sequence
  Synthetic oligonucleotide
tgaccggacggacccccggacagtgatcgtcctaca

SEQ ID NO: 13811 - DNA, 35 bp, Artificial Sequence
  Synthetic oligonucleotide
tgagaaaccaggcgtcatccgtcctgaccgcacat

SEQ ID NO: 13812 - DNA, 35 bp, Artificial Sequence
  Synthetic oligonucleotide
tggagccgtaatcaccccataacgcacccggcccc

SEQ ID NO: 13813 - DNA, 35 bp, Artificial Sequence
  Synthetic oligonucleotide
tgtgcgcgggcacgacacgcctattacagccccag

SEQ ID NO: 13814 - DNA, 38 bp, Artificial Sequence
  Synthetic oligonucleotide
ttgacacacaggtggtgtaacgatgccaggaatggtga

SEQ ID NO: 13815 - DNA, 36 bp, Artificial Sequence
  Synthetic oligonucleotide
ttgccccagcaccatatttttgatcctcgcccacga

SEQ ID NO: 13816 - DNA, 35 bp, Artificial Sequence
  Synthetic oligonucleotide
aaacgagccaacgccatagttgttttgtgggactg

SEQ ID NO: 13817 - DNA, 35 bp, Artificial Sequence
  Synthetic oligonucleotide
aacacgcgcgaggacgatacataacctaccttgct

SEQ ID NO: 13818 - DNA, 35 bp, Artificial Sequence
  Synthetic oligonucleotide
aacgcagtcgccaaaagttatgtcggggcacgatc

SEQ ID NO: 13819 - DNA, 37 bp, Artificial Sequence
  Synthetic oligonucleotide
aactgcctcagtagtggtagttaagcacacgccacga

SEQ ID NO: 13820 - DNA, 35 bp, Artificial Sequence
  Synthetic oligonucleotide
acaacccagcgaccacattcgcaccccatccaccc

SEQ ID NO: 13821 - DNA, 38 bp, Artificial Sequence
  Synthetic oligonucleotide
acacaacgcccagtgtgcccctatagttagtccattga

SEQ ID NO: 13822 - DNA, 36 bp, Artificial Sequence
  Synthetic oligonucleotide
acacaacgctctctgcagaggctacgtcgaaatcaa

SEQ ID NO: 13823 - DNA, 35 bp, Artificial Sequence
  Synthetic oligonucleotide
acacaccagcccttgagatttcgcattgaggcatg

SEQ ID NO: 13824 - DNA, 36 bp, Artificial Sequence
  Synthetic oligonucleotide
acaccaccgccgagcaggaagggtagtcagcgataa

SEQ ID NO: 13825 - DNA, 37 bp, Artificial Sequence
  Synthetic oligonucleotide
acacccgcacctcagagcggtgagagcccaacgaaga

SEQ ID NO: 13826 - DNA, 37 bp, Artificial Sequence
  Synthetic oligonucleotide
acacgccgattccacaaggtgtgagttccataggtga

SEQ ID NO: 13827 - DNA, 35 bp, Artificial Sequence
  Synthetic oligonucleotide
accacaccaagctaacccatacagtgactctgtta

SEQ ID NO: 13828 - DNA, 35 bp, Artificial Sequence
  Synthetic oligonucleotide
accacccgccactggggtgtacggggcacgctagc

SEQ ID NO: 13829 - DNA, 36 bp, Artificial Sequence
  Synthetic oligonucleotide
accattgccggccaatgagctcccctgccctgcata

SEQ ID NO: 13830 - DNA, 36 bp, Artificial Sequence
  Synthetic oligonucleotide
accgacgcccgtgatgcaacgattcgatctctcata

SEQ ID NO: 13831 - DNA, 35 bp, Artificial Sequence
  Synthetic oligonucleotide
acgaacggacggatgatttctaatctagatgacaa

SEQ ID NO: 13832 - DNA, 35 bp, Artificial Sequence
  Synthetic oligonucleotide
acgaacgggcaccatagctatagaacgttaagtaa

SEQ ID NO: 13833 - DNA, 36 bp, Artificial Sequence
  Synthetic oligonucleotide
acgatccgcaatcagatcctggatcgtcatccgtaa

SEQ ID NO: 13834 - DNA, 36 bp, Artificial Sequence
  Synthetic oligonucleotide
agacaagcgccaaactatgccaaggtgaccatagta

SEQ ID NO: 13835 - DNA, 37 bp, Artificial Sequence
  Synthetic oligonucleotide
atcacaagagcaccgatcaggcatgaggagatgcaga

SEQ ID NO: 13836 - DNA, 38 bp, Artificial Sequence
  Synthetic oligonucleotide
atcatccgcatcagtgaaagccgatagttacgaattga

SEQ ID NO: 13837 - DNA, 36 bp, Artificial Sequence
  Synthetic oligonucleotide
atcccaggacgcaactctgacaggggccccttgtaa

SEQ ID NO: 13838 - DNA, 37 bp, Artificial Sequence
  Synthetic oligonucleotide
atcgcccgttgcaggcgtgtgaaggactgacagtaga

SEQ ID NO: 13839 - DNA, 35 bp, Artificial Sequence
  Synthetic oligonucleotide
atcgccgacgtacagtagtatgacggacaccctta

SEQ ID NO: 13840 - DNA, 35 bp, Artificial Sequence
  Synthetic oligonucleotide
atgccatgcacgccaactattcatatagccaccac

SEQ ID NO: 13841 - DNA, 35 bp, Artificial Sequence
  Synthetic oligonucleotide
atgggcgcaacggatcaattaggactggcatattg

SEQ ID NO: 13842 - DNA, 35 bp, Artificial Sequence
  Synthetic oligonucleotide
atggtccggtgccggtctgagtaaagaggcgcagt

SEQ ID NO: 13843 - DNA, 36 bp, Artificial Sequence
  Synthetic oligonucleotide
atgtcgcaagctgccctagtcatagcgaagctacca

SEQ ID NO: 13844 - DNA, 37 bp, Artificial Sequence
  Synthetic oligonucleotide
cggacatgccagctaatgtattggagattgcgcgtga

SEQ ID NO: 13845 - DNA, 38 bp, Artificial Sequence
  Synthetic oligonucleotide
gaacaaccgcagttggtcatagagtacgtagggcttga

SEQ ID NO: 13846 - DNA, 38 bp, Artificial Sequence
  Synthetic oligonucleotide
gaacagggatcgagtcgtctcggacctgttgaacatga

SEQ ID NO: 13847 - DNA, 37 bp, Artificial Sequence
  Synthetic oligonucleotide
gaagcgcactccacacgacatggtcccgcggtcggga

SEQ ID NO: 13848 - DNA, 35 bp, Artificial Sequence
  Synthetic oligonucleotide
gacacacgcactatacctccacagaaagccaattg

SEQ ID NO: 13849 - DNA, 38 bp, Artificial Sequence
  Synthetic oligonucleotide
gacacgacagtgacgtgcgtagggaacggtgttattga

SEQ ID NO: 13850 - DNA, 35 bp, Artificial Sequence
  Synthetic oligonucleotide
gacacgatcaataacgtactggaaacatcgcctga

SEQ ID NO: 13851 - DNA, 34 bp, Artificial Sequence
  Synthetic oligonucleotide
gacactaggccccacagagcagcatctcaagtcg

SEQ ID NO: 13852 - DNA, 35 bp, Artificial Sequence
  Synthetic oligonucleotide
gaccacgtctctgctttaccgtgcgctcctaagca

SEQ ID NO: 13853 - DNA, 37 bp, Artificial Sequence
  Synthetic oligonucleotide
gaccagccgcaagaagtacccagacgaagcattcgga

SEQ ID NO: 13854 - DNA, 35 bp, Artificial Sequence
  Synthetic oligonucleotide
gaccggtgtctagtctgacctctgctacaatttac

SEQ ID NO: 13855 - DNA, 35 bp, Artificial Sequence
  Synthetic oligonucleotide
gagacacaggggggttatggggctagtcttagtgc

SEQ ID NO: 13856 - DNA, 35 bp, Artificial Sequence
  Synthetic oligonucleotide
gagccgaacgattgggtgtcgttacgggacacggg

SEQ ID NO: 13857 - DNA, 36 bp, Artificial Sequence
  Synthetic oligonucleotide
gagccggaaggaagttcggtactagacgtcaatcga

SEQ ID NO: 13858 - DNA, 38 bp, Artificial Sequence
  Synthetic oligonucleotide
gataacgctccaccgcaatatagacatcctcttcgtga

SEQ ID NO: 13859 - DNA, 36 bp, Artificial Sequence
  Synthetic oligonucleotide
gatacgagaggtcgaggacaataaggtgaggatgta

SEQ ID NO: 13860 - DNA, 36 bp, Artificial Sequence
  Synthetic oligonucleotide
gatacgcctacatccgactgactacggagtacctga

SEQ ID NO: 13861 - DNA, 35 bp, Artificial Sequence
  Synthetic oligonucleotide
gatcacgccaaactcggacaataacatgattggcc

SEQ ID NO: 13862 - DNA, 35 bp, Artificial Sequence
  Synthetic oligonucleotide
gatgcaaactcgaggcgatcattcttaccaaacct

SEQ ID NO: 13863 - DNA, 36 bp, Artificial Sequence
  Synthetic oligonucleotide
gatgcaggagatggagtagagaggcgtgcatggaga

SEQ ID NO: 13864 - DNA, 35 bp, Artificial Sequence
  Synthetic oligonucleotide
gatgcgcacgtcaccattttgtgagactcaccacc

SEQ ID NO: 13865 - DNA, 36 bp, Artificial Sequence
  Synthetic oligonucleotide
gatgcgggctcgtatgccgagaacgcctccctgtta

SEQ ID NO: 13866 - DNA, 36 bp, Artificial Sequence
  Synthetic oligonucleotide
gcacaacagcacgtgggccaaagggcgagatggcta

SEQ ID NO: 13867 - DNA, 36 bp, Artificial Sequence
  Synthetic oligonucleotide
gcacacagtcgagggaattttgtccatgcaaggcga

SEQ ID NO: 13868 - DNA, 35 bp, Artificial Sequence
  Synthetic oligonucleotide
gcacgagaacggaccagatccagtcacgcacgcta

SEQ ID NO: 13869 - DNA, 35 bp, Artificial Sequence
  Synthetic oligonucleotide
gcacgccgactgagagttacaagcaaatctggatt

SEQ ID NO: 13870 - DNA, 37 bp, Artificial Sequence
  Synthetic oligonucleotide
gcatcacggtacggaattgtgtactctcaacaggcga

SEQ ID NO: 13871 - DNA, 37 bp, Artificial Sequence
  Synthetic oligonucleotide
gccaaccacaatgtgaactgatccgtgtaccgtttga

SEQ ID NO: 13872 - DNA, 36 bp, Artificial Sequence
  Synthetic oligonucleotide
gccaacggtccgatggctagtgggggacaaccttaa

SEQ ID NO: 13873 - DNA, 38 bp, Artificial Sequence
  Synthetic oligonucleotide
gccaagcgcaaacgatagagattagatgactcgaatga

SEQ ID NO: 13874 - DNA, 38 bp, Artificial Sequence
  Synthetic oligonucleotide
gccgaacacgtcgcctgtggagtgcacgttgggaatga

SEQ ID NO: 13875 - DNA, 35 bp, Artificial Sequence
  Synthetic oligonucleotide
gccgagaggcccagttaagagcccgtcggacatcg

SEQ ID NO: 13876 - DNA, 36 bp, Artificial Sequence
  Synthetic oligonucleotide
gccgatggtacgtcagacccccagacagaacgggca

SEQ ID NO: 13877 - DNA, 38 bp, Artificial Sequence
  Synthetic oligonucleotide
gcgaacaaacgaaatgagccctactgaccccgtggtga

SEQ ID NO: 13878 - DNA, 35 bp, Artificial Sequence
  Synthetic oligonucleotide
gcgaggtcaagtccccggtgacctgtagatcaatg

SEQ ID NO: 13879 - DNA, 35 bp, Artificial Sequence
  Synthetic oligonucleotide
ggacatgccacacttccctttgatgactttcgcac

SEQ ID NO: 13880 - DNA, 38 bp, Artificial Sequence
  Synthetic oligonucleotide
ggacgcatccgaacaccccgtcccgccactcgtcatga

SEQ ID NO: 13881 - DNA, 37 bp, Artificial Sequence
  Synthetic oligonucleotide
ggtcacgaccacacctgatcttctcagtaccctagga

SEQ ID NO: 13882 - DNA, 35 bp, Artificial Sequence
  Synthetic oligonucleotide
gtcacgacacagttacgctttggactgacgctagc

SEQ ID NO: 13883 - DNA, 38 bp, Artificial Sequence
  Synthetic oligonucleotide
gtcacgcaaggtgaaaactgacgggtggacgagagtga

SEQ ID NO: 13884 - DNA, 36 bp, Artificial Sequence
  Synthetic oligonucleotide
gtcgaccaccgggtcaagctttgattcgtgttccaa

SEQ ID NO: 13885 - DNA, 38 bp, Artificial Sequence
  Synthetic oligonucleotide
gtgaacgtccgcctttagttatttccccgtcttgctga

SEQ ID NO: 13886 - DNA, 37 bp, Artificial Sequence
  Synthetic oligonucleotide
gtgactgcaacgacgtacggaaggagacttcaaccga

SEQ ID NO: 13887 - DNA, 35 bp, Artificial Sequence
  Synthetic oligonucleotide
gtgcaattccgaggttaccaaatgtcgactagaag

SEQ ID NO: 13888 - DNA, 37 bp, Artificial Sequence
  Synthetic oligonucleotide
gtggaccgtgtggcatgtgcgtacattctttacagga

SEQ ID NO: 13889 - DNA, 36 bp, Artificial Sequence
  Synthetic oligonucleotide
gtgggacgcggacggtcatctggacatgccacaaga

SEQ ID NO: 13890 - DNA, 36 bp, Artificial Sequence
  Synthetic oligonucleotide
gttgccatacagcgtgtcgaaatccaactcatcaga

SEQ ID NO: 13891 - DNA, 35 bp, Artificial Sequence
  Synthetic oligonucleotide
gttggacgccggtttattccaactaggaccctacg

SEQ ID NO: 13892 - DNA, 35 bp, Artificial Sequence
  Synthetic oligonucleotide
taccaacggtatggcccctcccagtcgttaccccc

SEQ ID NO: 13893 - DNA, 35 bp, Artificial Sequence
  Synthetic oligonucleotide
tacgacccgggtcgggtgcacattaaggagagtag

SEQ ID NO: 13894 - DNA, 34 bp, Artificial Sequence
  Synthetic oligonucleotide
tacgcacgaacgtttgctaagaaacagatccatt

SEQ ID NO: 13895 - DNA, 35 bp, Artificial Sequence
  Synthetic oligonucleotide
tacgcagtccgtatacgcccacttcaaaatgcaca

SEQ ID NO: 13896 - DNA, 37 bp, Artificial Sequence
  Synthetic oligonucleotide
tagtccgcaatcggtcgagtactgagtggtcgggaga

SEQ ID NO: 13897 - DNA, 38 bp, Artificial Sequence
  Synthetic oligonucleotide
tatcgaaccgcaacagtaaatggatagcagttatgtga

SEQ ID NO: 13898 - DNA, 36 bp, Artificial Sequence
  Synthetic oligonucleotide
tatgccacccgcatcaggcccaagtcgatacccaga

SEQ ID NO: 13899 - DNA, 38 bp, Artificial Sequence
  Synthetic oligonucleotide
tcaaacggaagcagttgcggaatagcacacacccttga

SEQ ID NO: 13900 - DNA, 35 bp, Artificial Sequence
  Synthetic oligonucleotide
tcacgagcaacgtacagtggcatactacccttgac

SEQ ID NO: 13901 - DNA, 35 bp, Artificial Sequence
  Synthetic oligonucleotide
tcacgcgcaaggactgcagattgcgaccgtcttag

SEQ ID NO: 13902 - DNA, 38 bp, Artificial Sequence
  Synthetic oligonucleotide
tccagtccgccgccctgaatagctttcaccgaccttga

SEQ ID NO: 13903 - DNA, 38 bp, Artificial Sequence
  Synthetic oligonucleotide
tgacaagcaacagatacccacggtgcgacaatctctga

SEQ ID NO: 13904 - DNA, 37 bp, Artificial Sequence
  Synthetic oligonucleotide
tgacacgccatgcaaaaaaacgtataacaaacgcaga

SEQ ID NO: 13905 - DNA, 35 bp, Artificial Sequence
  Synthetic oligonucleotide
tgacgcaagctcatgcgtctacacttaagcgcggg

SEQ ID NO: 13906 - DNA, 38 bp, Artificial Sequence
  Synthetic oligonucleotide
tgactgagccgcttgcctaagatcgagtctagtagtga

SEQ ID NO: 13907 - DNA, 35 bp, Artificial Sequence
  Synthetic oligonucleotide
tgatgatgcgaagagcatagtccttatcggagaag

SEQ ID NO: 13908 - DNA, 38 bp, Artificial Sequence
  Synthetic oligonucleotide
tgcgccgccaacgtgtgtgctgcgaagcacatgcctga

SEQ ID NO: 13909 - DNA, 37 bp, Artificial Sequence
  Synthetic oligonucleotide
tgtgacatcgcagtcaagtgttagtgaggagacgcga

SEQ ID NO: 13910 - DNA, 37 bp, Artificial Sequence
  Synthetic oligonucleotide
tgtgcctggcgtgtcaatcacactgttaacctttaga

SEQ ID NO: 13911 - DNA, 35 bp, Artificial Sequence
  Synthetic oligonucleotide
ttcatcaccgcacacatccgacggggtaccgtaca

SEQ ID NO: 13912 - DNA, 35 bp, Artificial Sequence
  Synthetic oligonucleotide
ttggtccgccggtccagatgatacccttagttatg

SEQ ID NO: 13913 - DNA, 38 bp, Artificial Sequence
  Synthetic oligonucleotide
aacacacccacacaacagtttcgtggcagttatcttga

SEQ ID NO: 13914 - DNA, 36 bp, Artificial Sequence
  Synthetic oligonucleotide
aacaccgttggtcacgagaatggatttactctcaca

SEQ ID NO: 13915 - DNA, 36 bp, Artificial Sequence
  Synthetic oligonucleotide
aacctggcgcgggtgacttcggtccatttcagggca

SEQ ID NO: 13916 - DNA, 37 bp, Artificial Sequence
  Synthetic oligonucleotide
aacgatcccaatcgtaggggggggcattcttttgtga

SEQ ID NO: 13917 - DNA, 37 bp, Artificial Sequence
  Synthetic oligonucleotide
acacgcccacgacagagagcgtggagttgactgggga

SEQ ID NO: 13918 - DNA, 36 bp, Artificial Sequence
  Synthetic oligonucleotide
acacgccgcactcgacggtgtcatgtacatttagta

SEQ ID NO: 13919 - DNA, 37 bp, Artificial Sequence
  Synthetic oligonucleotide
acagccacggaatcaggaacaccggtcgacgctgcga

SEQ ID NO: 13920 - DNA, 35 bp, Artificial Sequence
  Synthetic oligonucleotide
acatagccgcccgtttttgacgagccgacctaagg

SEQ ID NO: 13921 - DNA, 35 bp, Artificial Sequence
  Synthetic oligonucleotide
accacaccagtagcgcacaacgtacttacaacata

SEQ ID NO: 13922 - DNA, 35 bp, Artificial Sequence
  Synthetic oligonucleotide
accacgcgaagttcagcaaataccgtattgttagt

SEQ ID NO: 13923 - DNA, 38 bp, Artificial Sequence
  Synthetic oligonucleotide
accgacacagagtagaggaacggaggtgcttcttttga

SEQ ID NO: 13924 - DNA, 35 bp, Artificial Sequence
  Synthetic oligonucleotide
acgcgactgcagtaaacctttctatttgctaaatg

SEQ ID NO: 13925 - DNA, 36 bp, Artificial Sequence
  Synthetic oligonucleotide
agacaaccgccgggccttcaactcaaagacatggca

SEQ ID NO: 13926 - DNA, 35 bp, Artificial Sequence
  Synthetic oligonucleotide
atcacgtacggagcgtgggctagattcgaattact

SEQ ID NO: 13927 - DNA, 36 bp, Artificial Sequence
  Synthetic oligonucleotide
atccgcaacatcgacgtaaaacacgacctctcgtaa

SEQ ID NO: 13928 - DNA, 38 bp, Artificial Sequence
  Synthetic oligonucleotide
atcgaccaccgcatggttccgacattcgtcacagatga

SEQ ID NO: 13929 - DNA, 35 bp, Artificial Sequence
  Synthetic oligonucleotide
atcgccaaacagccctcatcaagtcaggcgtacgt

SEQ ID NO: 13930 - DNA, 36 bp, Artificial Sequence
  Synthetic oligonucleotide
atgcgcaagcaacgggtatgcgcatgggaaggcata

SEQ ID NO: 13931 - DNA, 35 bp, Artificial Sequence
  Synthetic oligonucleotide
atgcgcccacgacgtgctctaaaacgatttctcct

SEQ ID NO: 13932 - DNA, 36 bp, Artificial Sequence
  Synthetic oligonucleotide
atgcgcccacgcaggtagtccttaagagagctttaa

SEQ ID NO: 13933 - DNA, 38 bp, Artificial Sequence
  Synthetic oligonucleotide
atggagcgccaccgagacatcttgctatggaaatttga

SEQ ID NO: 13934 - DNA, 37 bp, Artificial Sequence
  Synthetic oligonucleotide
caactgaccccgggctaagctcaatccgatgctagga

SEQ ID NO: 13935 - DNA, 35 bp, Artificial Sequence
  Synthetic oligonucleotide
cagacacgtacggcgattgaagagacttacgcacc

SEQ ID NO: 13936 - DNA, 35 bp, Artificial Sequence
  Synthetic oligonucleotide
gaaccggacccacgcctaaacaccgatagacatat

SEQ ID NO: 13937 - DNA, 35 bp, Artificial Sequence
  Synthetic oligonucleotide
gaagacggccaagatgtacgaacgagctagcttac

SEQ ID NO: 13938 - DNA, 35 bp, Artificial Sequence
  Synthetic oligonucleotide
gaagcacagggtacagatcgtacatgcctcctgtc

SEQ ID NO: 13939 - DNA, 36 bp, Artificial Sequence
  Synthetic oligonucleotide
gacacagtagggtgcgtagcgaactgcaatagcgca

SEQ ID NO: 13940 - DNA, 35 bp, Artificial Sequence
  Synthetic oligonucleotide
gacacccgacccacaaaacgtaaagaagggtactc

SEQ ID NO: 13941 - DNA, 35 bp, Artificial Sequence
  Synthetic oligonucleotide
gacacgtacgctgcacatccgagagcatcattcct

SEQ ID NO: 13942 - DNA, 38 bp, Artificial Sequence
  Synthetic oligonucleotide
gacatccgactgaagtacacgaggccatgccttactga

SEQ ID NO: 13943 - DNA, 35 bp, Artificial Sequence
  Synthetic oligonucleotide
gaccaaccgcctgctgtacgatgagcactaatggt

SEQ ID NO: 13944 - DNA, 36 bp, Artificial Sequence
  Synthetic oligonucleotide
gaccatgcgcatcatcgatatcatactccttgcgaa

SEQ ID NO: 13945 - DNA, 37 bp, Artificial Sequence
  Synthetic oligonucleotide
gacgacaccacggaaggcccattcgcactcgataaga

SEQ ID NO: 13946 - DNA, 36 bp, Artificial Sequence
  Synthetic oligonucleotide
gacgacgacaaagcgataggggttagtaatgcgaaa

SEQ ID NO: 13947 - DNA, 36 bp, Artificial Sequence
  Synthetic oligonucleotide
gacgcaatggtcacgatgcgaattcgtgagtcgcca

SEQ ID NO: 13948 - DNA, 38 bp, Artificial Sequence
  Synthetic oligonucleotide
gacgcatccggttcgtttgcagtcagaccttcctctga

SEQ ID NO: 13949 - DNA, 35 bp, Artificial Sequence
  Synthetic oligonucleotide
gacgtgggaccgcataggcctgatgtcagttcgga

SEQ ID NO: 13950 - DNA, 36 bp, Artificial Sequence
  Synthetic oligonucleotide
gacgtgtcgcagagacggcattttccagtgtagaaa

SEQ ID NO: 13951 - DNA, 35 bp, Artificial Sequence
  Synthetic oligonucleotide
gatgacgcccaagtgtactgggtcgagagtgtgcg

SEQ ID NO: 13952 - DNA, 38 bp, Artificial Sequence
  Synthetic oligonucleotide
gatgccatagtaggggattttaaggagggctacagtga

SEQ ID NO: 13953 - DNA, 35 bp, Artificial Sequence
  Synthetic oligonucleotide
gatgcgcaggaaatgtgtcatgtcgcggtataggt

SEQ ID NO: 13954 - DNA, 38 bp, Artificial Sequence
  Synthetic oligonucleotide
gatgcggaacgtaatatggattgcccgcttaattttga

SEQ ID NO: 13955 - DNA, 37 bp, Artificial Sequence
  Synthetic oligonucleotide
gcaaaggcaccgttaaggaatgcatgagaggtgagga

SEQ ID NO: 13956 - DNA, 35 bp, Artificial Sequence
  Synthetic oligonucleotide
gcacacgccaatcaagctgactgtcgatggctcta

SEQ ID NO: 13957 - DNA, 36 bp, Artificial Sequence
  Synthetic oligonucleotide
gcacgcaggatgttgttcggaggcatatgattgaca

SEQ ID NO: 13958 - DNA, 36 bp, Artificial Sequence
  Synthetic oligonucleotide
gcacggacctgcaaagtgatctctgttacatgccaa

SEQ ID NO: 13959 - DNA, 35 bp, Artificial Sequence
  Synthetic oligonucleotide
gcatgccaatcggtacctccacacgtacgattccc

SEQ ID NO: 13960 - DNA, 38 bp, Artificial Sequence
  Synthetic oligonucleotide
gccacactgaccccgcgtactccgacttagccttgtga

SEQ ID NO: 13961 - DNA, 37 bp, Artificial Sequence
  Synthetic oligonucleotide
gccacagtcccacagtaaagcctggaaagtaccatga

SEQ ID NO: 13962 - DNA, 37 bp, Artificial Sequence
  Synthetic oligonucleotide
gccacccgcagatagtcattcatccatgtgctcacga

SEQ ID NO: 13963 - DNA, 38 bp, Artificial Sequence
  Synthetic oligonucleotide
gccacgggggaagccgaggaggctatgtgcaactttga

SEQ ID NO: 13964 - DNA, 36 bp, Artificial Sequence
  Synthetic oligonucleotide
gccacgtgctgcgtaaacttgaccagagttgaggca

SEQ ID NO: 13965 - DNA, 35 bp, Artificial Sequence
  Synthetic oligonucleotide
gcccacgccaagctccccgtgcattccaaaggcaa

SEQ ID NO: 13966 - DNA, 37 bp, Artificial Sequence
  Synthetic oligonucleotide
gcccacgtacccaagccccactcactgtccggtcgga

SEQ ID NO: 13967 - DNA, 36 bp, Artificial Sequence
  Synthetic oligonucleotide
gccgaagccgtagatgaggcaaactcctggtccgta

SEQ ID NO: 13968 - DNA, 35 bp, Artificial Sequence
  Synthetic oligonucleotide
gccgatgctcaacacttaggcactctattaccgct

SEQ ID NO: 13969 - DNA, 35 bp, Artificial Sequence
  Synthetic oligonucleotide
gccggagagcagtagttgtgtttgattacgctggg

SEQ ID NO: 13970 - DNA, 35 bp, Artificial Sequence
  Synthetic oligonucleotide
gcctgaacaatagccctgatcaagtatcgcttgtt

SEQ ID NO: 13971 - DNA, 35 bp, Artificial Sequence
  Synthetic oligonucleotide
ggataccgccaaatatgtcgcctagagtcttagag

SEQ ID NO: 13972 - DNA, 35 bp, Artificial Sequence
  Synthetic oligonucleotide
gtacacacggactgtctcggtccaccttaccccat

SEQ ID NO: 13973 - DNA, 36 bp, Artificial Sequence
  Synthetic oligonucleotide
gtcgatgccaagtccatcatattgtgtaccgtgaaa

SEQ ID NO: 13974 - DNA, 37 bp, Artificial Sequence
  Synthetic oligonucleotide
gtgatccgcctggtatactgacgtacgaatacacgga

SEQ ID NO: 13975 - DNA, 35 bp, Artificial Sequence
  Synthetic oligonucleotide
gtggtgcgctaattcgcctaatagaacactctccg

SEQ ID NO: 13976 - DNA, 37 bp, Artificial Sequence
  Synthetic oligonucleotide
gtgtgcaggccggtaatctaaggaagtgcagtcgaga

SEQ ID NO: 13977 - DNA, 37 bp, Artificial Sequence
  Synthetic oligonucleotide
tacacacgcgactgtgcatgccgtacttaggatcaga

SEQ ID NO: 13978 - DNA, 36 bp, Artificial Sequence
  Synthetic oligonucleotide
tacgaaccgcaccaggagggtgtctaggcgcaggaa

SEQ ID NO: 13979 - DNA, 38 bp, Artificial Sequence
  Synthetic oligonucleotide
tatgtacaggcgatcggaatcagcactcgggagaatga

SEQ ID NO: 13980 - DNA, 36 bp, Artificial Sequence
  Synthetic oligonucleotide
tcaacgcggtaatcgatcgataaggtcatgtcgtca

SEQ ID NO: 13981 - DNA, 37 bp, Artificial Sequence
  Synthetic oligonucleotide
tcaagcccacgatagcgatccagaccctgtccctaga

SEQ ID NO: 13982 - DNA, 35 bp, Artificial Sequence
  Synthetic oligonucleotide
tcaaggccactggagctacataaatgcttaactca

SEQ ID NO: 13983 - DNA, 37 bp, Artificial Sequence
  Synthetic oligonucleotide
tcacgaccctacgcgtctcatcaccactcaccgaaga

SEQ ID NO: 13984 - DNA, 38 bp, Artificial Sequence
  Synthetic oligonucleotide
tgacggtacgctccgaggctaggcaacagtccatgtga

SEQ ID NO: 13985 - DNA, 37 bp, Artificial Sequence
  Synthetic oligonucleotide
tgaggacacacggaaaaccggtccagtagacgtatga

SEQ ID NO: 13986 - DNA, 36 bp, Artificial Sequence
  Synthetic oligonucleotide
tgatcagggcgaacaagataagggaatgggctggca

SEQ ID NO: 13987 - DNA, 36 bp, Artificial Sequence
  Synthetic oligonucleotide
tgcaatcgcgaagtggcgcaaacggcctgggggcta

SEQ ID NO: 13988 - DNA, 35 bp, Artificial Sequence
  Synthetic oligonucleotide
tgcgaccggtagggagaccccggtgtcctatgaga

SEQ ID NO: 13989 - DNA, 36 bp, Artificial Sequence
  Synthetic oligonucleotide
tgcgagtgcgtggattgagtgtccgcgacgtcgcaa

SEQ ID NO: 13990 - DNA, 37 bp, Artificial Sequence
  Synthetic oligonucleotide
tgcgcccggcgggggagacacgctgaaacaccgcaga

SEQ ID NO: 13991 - DNA, 38 bp, Artificial Sequence
  Synthetic oligonucleotide
tgcgtagagagcaacggtaatgaggcatattgatctga

SEQ ID NO: 13992 - DNA, 35 bp, Artificial Sequence
  Synthetic oligonucleotide
tgtgcatacgtacgaccggtacctagctctaaaat

SEQ ID NO: 13993 - DNA, 37 bp, Artificial Sequence
  Synthetic oligonucleotide
tgtgggcgaagggtcctacacacgttcagcaggagga

SEQ ID NO: 13994 - DNA, 36 bp, Artificial Sequence
  Synthetic oligonucleotide
aacaacaagacgcggcaggttgcccggaccgttcta

SEQ ID NO: 13995 - DNA, 38 bp, Artificial Sequence
  Synthetic oligonucleotide
aacagtccgccgacacgccgtacagatcgcctatctga

SEQ ID NO: 13996 - DNA, 36 bp, Artificial Sequence
  Synthetic oligonucleotide
aacccaccccatcaccgtgtacaagcagaacgccca

SEQ ID NO: 13997 - DNA, 35 bp, Artificial Sequence
  Synthetic oligonucleotide
acaccaccacagttgtagtagcacgtaaggatcaa

SEQ ID NO: 13998 - DNA, 35 bp, Artificial Sequence
  Synthetic oligonucleotide
acagggccaacgcacagatcgtcttatcgaagggg

SEQ ID NO: 13999 - DNA, 35 bp, Artificial Sequence
  Synthetic oligonucleotide
accacatccacacacaccataaaacgagacatcgg

SEQ ID NO: 14000 - DNA, 38 bp, Artificial Sequence
  Synthetic oligonucleotide
accatggccaatccggaagggtacgatacctcagttga

SEQ ID NO: 14001 - DNA, 35 bp, Artificial Sequence
  Synthetic oligonucleotide
accgaccacggcacatgatctggcgtgtattcacg

SEQ ID NO: 14002 - DNA, 36 bp, Artificial Sequence
  Synthetic oligonucleotide
acgaagcgcagaaccccagattagtccgggttagga

SEQ ID NO: 14003 - DNA, 37 bp, Artificial Sequence
  Synthetic oligonucleotide
acgacgggacgaggatagagtgaggccgatccatgga

SEQ ID NO: 14004 - DNA, 36 bp, Artificial Sequence
  Synthetic oligonucleotide
acgcacacccccatgttacagatcctatgttaggaa

SEQ ID NO: 14005 - DNA, 35 bp, Artificial Sequence
  Synthetic oligonucleotide
acgcgaacccatagtgtatggtctgccctcatgca

SEQ ID NO: 14006 - DNA, 35 bp, Artificial Sequence
  Synthetic oligonucleotide
actgcacgcaagattgaccgacccttgctatactg

SEQ ID NO: 14007 - DNA, 38 bp, Artificial Sequence
  Synthetic oligonucleotide
agtgccggccggcgagattctgctaccctacccgttga

SEQ ID NO: 14008 - DNA, 37 bp, Artificial Sequence
  Synthetic oligonucleotide
atcgccgcacctcaaacctgtattcacctcggtccga

SEQ ID NO: 14009 - DNA, 35 bp, Artificial Sequence
  Synthetic oligonucleotide
atgggacggtgcaaacgggctcgcatgatttgagg

SEQ ID NO: 14010 - DNA, 35 bp, Artificial Sequence
  Synthetic oligonucleotide
ccggacgaggtggatacggcgggcctcggacggtt

SEQ ID NO: 14011 - DNA, 36 bp, Artificial Sequence
  Synthetic oligonucleotide
gaacgcaaacgtgcgaaacccgaagtctttaccata

SEQ ID NO: 14012 - DNA, 36 bp, Artificial Sequence
  Synthetic oligonucleotide
gacaaacgcagacattgtttttgcgaaaggtcgtaa

SEQ ID NO: 14013 - DNA, 37 bp, Artificial Sequence
  Synthetic oligonucleotide
gacaagcgaacagtatagcaatcgatggcagacgtga

SEQ ID NO: 14014 - DNA, 36 bp, Artificial Sequence
  Synthetic oligonucleotide
gacacaagctgcatgtcaatctcggacccgccaaca

SEQ ID NO: 14015 - DNA, 36 bp, Artificial Sequence
  Synthetic oligonucleotide
gacacgcacacatcgagactagcggtgattgttaga

SEQ ID NO: 14016 - DNA, 35 bp, Artificial Sequence
  Synthetic oligonucleotide
gacatgccattggtggtggctgagagaaaaacgta

SEQ ID NO: 14017 - DNA, 36 bp, Artificial Sequence
  Synthetic oligonucleotide
gaccacgacgttggcgaaggaaccgaccccacacca

SEQ ID NO: 14018 - DNA, 35 bp, Artificial Sequence
  Synthetic oligonucleotide
gaccagcaaccgtgcgttgagtctgctattcgtgc

SEQ ID NO: 14019 - DNA, 35 bp, Artificial Sequence
  Synthetic oligonucleotide
gaccgtgggcggaacaaagcttagaccccaacgct

SEQ ID NO: 14020 - DNA, 36 bp, Artificial Sequence
  Synthetic oligonucleotide
gacctcagcaagcaggctcctatccattcccattta

SEQ ID NO: 14021 - DNA, 35 bp, Artificial Sequence
  Synthetic oligonucleotide
gacgaccaacccgatctgcttgaactcattaccat

SEQ ID NO: 14022 - DNA, 38 bp, Artificial Sequence
  Synthetic oligonucleotide
gacgactgcagaggctgacgtcgaaagaacaaggctga

SEQ ID NO: 14023 - DNA, 35 bp, Artificial Sequence
  Synthetic oligonucleotide
gacgagtcaggatatattggcgtcgacacacacgt

SEQ ID NO: 14024 - DNA, 35 bp, Artificial Sequence
  Synthetic oligonucleotide
gacgcggtgtcacgtgatacttccacccacaaaac

SEQ ID NO: 14025 - DNA, 36 bp, Artificial Sequence
  Synthetic oligonucleotide
gactcgcccccgaccacagaaagttcgtaatcgtaa

SEQ ID NO: 14026 - DNA, 36 bp, Artificial Sequence
  Synthetic oligonucleotide
gactgcacggccaatgtccacatctcttcaaaacta

SEQ ID NO: 14027 - DNA, 35 bp, Artificial Sequence
  Synthetic oligonucleotide
gagacccgagagggtgaggaccgtcaaccgtgata

SEQ ID NO: 14028 - DNA, 38 bp, Artificial Sequence
  Synthetic oligonucleotide
gagccagcaggtcgcagctttcacggctaagctaatga

SEQ ID NO: 14029 - DNA, 36 bp, Artificial Sequence
  Synthetic oligonucleotide
gagccgtcaaaggcacatgtcagacccccagaccga

SEQ ID NO: 14030 - DNA, 38 bp, Artificial Sequence
  Synthetic oligonucleotide
gagcgacacacaaagagtcgcgatactctaggtcttga

SEQ ID NO: 14031 - DNA, 35 bp, Artificial Sequence
  Synthetic oligonucleotide
gaggtcgcccaggtccgatttgagcatttgtcgtg

SEQ ID NO: 14032 - DNA, 35 bp, Artificial Sequence
  Synthetic oligonucleotide
gatcatcatgcttccctgcagactccacatttcgg

SEQ ID NO: 14033 - DNA, 38 bp, Artificial Sequence
  Synthetic oligonucleotide
gatgacgtgcggaggtttatccaattgtgactttttga

SEQ ID NO: 14034 - DNA, 36 bp, Artificial Sequence
  Synthetic oligonucleotide
gatgcacaacagcttttgtacacggttgtcatgcaa

SEQ ID NO: 14035 - DNA, 36 bp, Artificial Sequence
  Synthetic oligonucleotide
gccacgggtgaggatttcaatggcgctgtgtaatta

SEQ ID NO: 14036 - DNA, 36 bp, Artificial Sequence
  Synthetic oligonucleotide
gccaggcacatgcaggcaatcaattaatggagcata

SEQ ID NO: 14037 - DNA, 35 bp, Artificial Sequence
  Synthetic oligonucleotide
gccgcacccctccctcatcccagacgatttacgtt

SEQ ID NO: 14038 - DNA, 35 bp, Artificial Sequence
  Synthetic oligonucleotide
gtcaccaccagtacatgctacaccatccttatgtt

SEQ ID NO: 14039 - DNA, 37 bp, Artificial Sequence
  Synthetic oligonucleotide
gtccagcaacagtggtaatgacacgtttggacacaga

SEQ ID NO: 14040 - DNA, 35 bp, Artificial Sequence
  Synthetic oligonucleotide
gtcgaagcatgggagatgtcaactagttccctata

SEQ ID NO: 14041 - DNA, 37 bp, Artificial Sequence
  Synthetic oligonucleotide
gtgacgcgcgcagtctttgttagtggcccgaattaaa

SEQ ID NO: 14042 - DNA, 36 bp, Artificial Sequence
  Synthetic oligonucleotide
tactgaggcggtatcgaaacaaagggatgagacgta

SEQ ID NO: 14043 - DNA, 37 bp, Artificial Sequence
  Synthetic oligonucleotide
tcaaacacgcacgtctccggtcgttcattagatagga

SEQ ID NO: 14044 - DNA, 35 bp, Artificial Sequence
  Synthetic oligonucleotide
tcaccaatccgcacactaacccagactatcaaggt

SEQ ID NO: 14045 - DNA, 37 bp, Artificial Sequence
  Synthetic oligonucleotide
tcacgacacgcttagtgtggcaagcaacacgcgatga

SEQ ID NO: 14046 - DNA, 37 bp, Artificial Sequence
  Synthetic oligonucleotide
tcacgcgagcccagcgacatgcacactgatgggagga

SEQ ID NO: 14047 - DNA, 38 bp, Artificial Sequence
  Synthetic oligonucleotide
tcagtgacgcggggcaactggacgtacgaatgccttga

SEQ ID NO: 14048 - DNA, 37 bp, Artificial Sequence
  Synthetic oligonucleotide
tcatccgacctcgttcgttactatcatgttacgttga

SEQ ID NO: 14049 - DNA, 36 bp, Artificial Sequence
  Synthetic oligonucleotide
tcatgcccagacgcggtacctgttctgtaacgaaca

SEQ ID NO: 14050 - DNA, 37 bp, Artificial Sequence
  Synthetic oligonucleotide
tccacccaggaggacaggcttaaatgtgcgacataga

SEQ ID NO: 14051 - DNA, 35 bp, Artificial Sequence
  Synthetic oligonucleotide
tcgaaggctgagcaggtacagatgggaggtcgcac

SEQ ID NO: 14052 - DNA, 38 bp, Artificial Sequence
  Synthetic oligonucleotide
tgcaccgttggacatcgttgttaaggggggcctcatga

SEQ ID NO: 14053 - DNA, 36 bp, Artificial Sequence
  Synthetic oligonucleotide
ttcgcttccgttcacctaaacaaatgcgaaggcgaa

SEQ ID NO: 14054 - DNA, 36 bp, Artificial Sequence
  Synthetic oligonucleotide
aacacacgcggacaaattggatgcgtcccggcgaaa

SEQ ID NO: 14055 - DNA, 35 bp, Artificial Sequence
  Synthetic oligonucleotide
aacacccgccgtcaaagcgcaccacctttctatca

SEQ ID NO: 14056 - DNA, 36 bp, Artificial Sequence
  Synthetic oligonucleotide
aaccacgcccacaggctaaaaactgcgttaatgcaa

SEQ ID NO: 14057 - DNA, 35 bp, Artificial Sequence
  Synthetic oligonucleotide
aaccgccacatatcttaaccttggaacccaccgcg

SEQ ID NO: 14058 - DNA, 35 bp, Artificial Sequence
  Synthetic oligonucleotide
acaacaggcgaggttgacgataaggctcgcttgtg

SEQ ID NO: 14059 - DNA, 38 bp, Artificial Sequence
  Synthetic oligonucleotide
acacaccagtcgccgagcacaaagacgattgagtgtga

SEQ ID NO: 14060 - DNA, 36 bp, Artificial Sequence
  Synthetic oligonucleotide
acacaccggatagcatagtactgcggacgcctttca

SEQ ID NO: 14061 - DNA, 37 bp, Artificial Sequence
  Synthetic oligonucleotide
acacagcaccgcatctgtacacacatctccttcgcga

SEQ ID NO: 14062 - DNA, 37 bp, Artificial Sequence
  Synthetic oligonucleotide
acacgctagcagtgccttgtctattcacttttaccga

SEQ ID NO: 14063 - DNA, 36 bp, Artificial Sequence
  Synthetic oligonucleotide
acatgaagccacgacgtccttgcctatccctgccta

SEQ ID NO: 14064 - DNA, 35 bp, Artificial Sequence
  Synthetic oligonucleotide
accacaacgcagcctaaacagggcggcctgaagga

SEQ ID NO: 14065 - DNA, 36 bp, Artificial Sequence
  Synthetic oligonucleotide
accaccgcgacgatacgaggcttgtagccggtgaga

SEQ ID NO: 14066 - DNA, 36 bp, Artificial Sequence
  Synthetic oligonucleotide
accacgtccggaaccgttataccgcaattcagtcga

SEQ ID NO: 14067 - DNA, 37 bp, Artificial Sequence
  Synthetic oligonucleotide
accatccgcgggtcaccacgatttgtagttagaagga

SEQ ID NO: 14068 - DNA, 35 bp, Artificial Sequence
  Synthetic oligonucleotide
accatgccatagcaagcataagtcgaaggtcggta

SEQ ID NO: 14069 - DNA, 37 bp, Artificial Sequence
  Synthetic oligonucleotide
accgcccgggacgagaagagatcaaggccgacccaga

SEQ ID NO: 14070 - DNA, 36 bp, Artificial Sequence
  Synthetic oligonucleotide
atgacacgcctcgagatgagatgacgtgtcttggaa

SEQ ID NO: 14071 - DNA, 37 bp, Artificial Sequence
  Synthetic oligonucleotide
atgcaccgagccactgcttcttaccgcctctggacga

SEQ ID NO: 14072 - DNA, 35 bp, Artificial Sequence
  Synthetic oligonucleotide
cagaccgttgcacacgcagcagtattttcgtgtcg

SEQ ID NO: 14073 - DNA, 37 bp, Artificial Sequence
  Synthetic oligonucleotide
gaacgcagatcgcgagaactgacgtttctaactccga

SEQ ID NO: 14074 - DNA, 36 bp, Artificial Sequence
  Synthetic oligonucleotide
gaatagcgcgagcagtcaacggagacccaagccaca

SEQ ID NO: 14075 - DNA, 35 bp, Artificial Sequence
  Synthetic oligonucleotide
gacacaacaaggctgtacgaagccgtggacacgag

SEQ ID NO: 14076 - DNA, 38 bp, Artificial Sequence
  Synthetic oligonucleotide
gacacgtccgaacatgagagaggcggtgacaggaatga

SEQ ID NO: 14077 - DNA, 38 bp, Artificial Sequence
  Synthetic oligonucleotide
gacccgtatcgcgacacttaaggaattgccacctttga

SEQ ID NO: 14078 - DNA, 34 bp, Artificial Sequence
  Synthetic oligonucleotide
gaccgtcacacaatccgcacgtacgctcctttca

SEQ ID NO: 14079 - DNA, 38 bp, Artificial Sequence
  Synthetic oligonucleotide
gacgacgcacatggtggatctcctgaggtagaccgtga

SEQ ID NO: 14080 - DNA, 35 bp, Artificial Sequence
  Synthetic oligonucleotide
gacgacgtagctgcgactatgttaccaatggtcag

SEQ ID NO: 14081 - DNA, 35 bp, Artificial Sequence
  Synthetic oligonucleotide
gacgcggaagtcagtgacactgtgctgtttagcat

SEQ ID NO: 14082 - DNA, 35 bp, Artificial Sequence
  Synthetic oligonucleotide
gactccgtagggcgatgaaacggctggcaaagacg

SEQ ID NO: 14083 - DNA, 38 bp, Artificial Sequence
  Synthetic oligonucleotide
gactgagcaggtgttgataagggatacggccatcttga

SEQ ID NO: 14084 - DNA, 35 bp, Artificial Sequence
  Synthetic oligonucleotide
gactgcacaggtgccactcattacgaacgagaatt

SEQ ID NO: 14085 - DNA, 37 bp, Artificial Sequence
  Synthetic oligonucleotide
gactgccccaagcaatgtgtaataggatgcaggagca

SEQ ID NO: 14086 - DNA, 38 bp, Artificial Sequence
  Synthetic oligonucleotide
gactgcggaggtgcagtcggtagaaataggcttgatga

SEQ ID NO: 14087 - DNA, 38 bp, Artificial Sequence
  Synthetic oligonucleotide
gagcacggtgcagtgtgaaatatgttagcagttagtga

SEQ ID NO: 14088 - DNA, 36 bp, Artificial Sequence
  Synthetic oligonucleotide
gagctgggcggcacctataacgataactggtatgta

SEQ ID NO: 14089 - DNA, 37 bp, Artificial Sequence
  Synthetic oligonucleotide
gatcacccgtccgcaacgaacatcgccgcacccttga

SEQ ID NO: 14090 - DNA, 36 bp, Artificial Sequence
  Synthetic oligonucleotide
gatccacgccgaactatgtccccacagatattcgta

SEQ ID NO: 14091 - DNA, 36 bp, Artificial Sequence
  Synthetic oligonucleotide
gatccgcacgcagacgcttggagcaatacttccgca

SEQ ID NO: 14092 - DNA, 37 bp, Artificial Sequence
  Synthetic oligonucleotide
gatggagtggccggcatggggttccgactcagtgtga

SEQ ID NO: 14093 - DNA, 37 bp, Artificial Sequence
  Synthetic oligonucleotide
gcaaacaaacctcgaaacaagcggctatgcaccggga

SEQ ID NO: 14094 - DNA, 36 bp, Artificial Sequence
  Synthetic oligonucleotide
gcaaacccacgaacgtctcacaaggtccctccatca

SEQ ID NO: 14095 - DNA, 36 bp, Artificial Sequence
  Synthetic oligonucleotide
gcaacctgggggatgcgcggtaatttctggggaata

SEQ ID NO: 14096 - DNA, 36 bp, Artificial Sequence
  Synthetic oligonucleotide
gcacaaccacaaacatacccctagacgcatgggtca

SEQ ID NO: 14097 - DNA, 37 bp, Artificial Sequence
  Synthetic oligonucleotide
gcacacaccaattgcaaacaagactgtcccgcaacga

SEQ ID NO: 14098 - DNA, 36 bp, Artificial Sequence
  Synthetic oligonucleotide
gcaccatcgagagttgccagtgggtacagtcagtca

SEQ ID NO: 14099 - DNA, 36 bp, Artificial Sequence
  Synthetic oligonucleotide
gcatgcatccgcgaataaggacggcgagtctcctca

SEQ ID NO: 14100 - DNA, 36 bp, Artificial Sequence
  Synthetic oligonucleotide
gccaaccgagccagtagagctgagcgaggctgagta

SEQ ID NO: 14101 - DNA, 35 bp, Artificial Sequence
  Synthetic oligonucleotide
gccaacggaagtggagtaaaataacggtgcaacag

SEQ ID NO: 14102 - DNA, 38 bp, Artificial Sequence
  Synthetic oligonucleotide
gccatcaacggcactctttctcctacgtacacccgtga

SEQ ID NO: 14103 - DNA, 35 bp, Artificial Sequence
  Synthetic oligonucleotide
gccatgcatcctgacaagtcgtgctaagttttgcc

SEQ ID NO: 14104 - DNA, 35 bp, Artificial Sequence
  Synthetic oligonucleotide
gccggaagacgaagcggaacgtggatagatcggtg

SEQ ID NO: 14105 - DNA, 36 bp, Artificial Sequence
  Synthetic oligonucleotide
gcctggcaacatcacgtcggaaaagatagagaggca

SEQ ID NO: 14106 - DNA, 35 bp, Artificial Sequence
  Synthetic oligonucleotide
gcctgtgtccgcattaaatcgaaaggaggcctgtt

SEQ ID NO: 14107 - DNA, 38 bp, Artificial Sequence
  Synthetic oligonucleotide
gcgagacacaggtgctgcataaggggaacggtttgtga

SEQ ID NO: 14108 - DNA, 35 bp, Artificial Sequence
  Synthetic oligonucleotide
gcgaggagtgcacgtgaaaccgctcagatggccat

SEQ ID NO: 14109 - DNA, 37 bp, Artificial Sequence
  Synthetic oligonucleotide
gcgcgagacacaaactagtgtggggagaacgcttcga

SEQ ID NO: 14110 - DNA, 38 bp, Artificial Sequence
  Synthetic oligonucleotide
gcgcgcagcacgtattgcttagagaaggcagaacatga

SEQ ID NO: 14111 - DNA, 37 bp, Artificial Sequence
  Synthetic oligonucleotide
gctaagtgtgtgcactgaccccgagagacgctagtga

SEQ ID NO: 14112 - DNA, 36 bp, Artificial Sequence
  Synthetic oligonucleotide
gctgagccaggcaaccaacacgctgcacactagcca

SEQ ID NO: 14113 - DNA, 36 bp, Artificial Sequence
  Synthetic oligonucleotide
ggactaggccccaaaggtgttcaatgtctgtcgtaa

SEQ ID NO: 14114 - DNA, 35 bp, Artificial Sequence
  Synthetic oligonucleotide
gtactcgcaaacctcatagtactggaggtgaggca

SEQ ID NO: 14115 - DNA, 35 bp, Artificial Sequence
  Synthetic oligonucleotide
gtcgagacgcagtatgttctttttccgtgtaggta

SEQ ID NO: 14116 - DNA, 37 bp, Artificial Sequence
  Synthetic oligonucleotide
gtcgagcatcaacattaaggtataagctgctagtgga

SEQ ID NO: 14117 - DNA, 38 bp, Artificial Sequence
  Synthetic oligonucleotide
gtgcaaagtgtgcacacgataataacgaaagtcaatga

SEQ ID NO: 14118 - DNA, 36 bp, Artificial Sequence
  Synthetic oligonucleotide
gtgcaacgcaaaaagcccaaacaccagtcgagccaa

SEQ ID NO: 14119 - DNA, 37 bp, Artificial Sequence
  Synthetic oligonucleotide
gtgcactgggccaagccaaacgagtgtcccaacacga

SEQ ID NO: 14120 - DNA, 36 bp, Artificial Sequence
  Synthetic oligonucleotide
gtgtgcaccacaacgtgtcttgatggtgtctgtcga

SEQ ID NO: 14121 - DNA, 35 bp, Artificial Sequence
  Synthetic oligonucleotide
gtgtgccacccggacgtaagttactgaataacacg

SEQ ID NO: 14122 - DNA, 35 bp, Artificial Sequence
  Synthetic oligonucleotide
tcaaccgcccatctgcctgcgcaacttactaccct

SEQ ID NO: 14123 - DNA, 35 bp, Artificial Sequence
  Synthetic oligonucleotide
tcacgcatgaggtcatctccgggggtccagtggaa

SEQ ID NO: 14124 - DNA, 37 bp, Artificial Sequence
  Synthetic oligonucleotide
tcactcgtagagccatgatgaacgttccactcgcgga

SEQ ID NO: 14125 - DNA, 35 bp, Artificial Sequence
  Synthetic oligonucleotide
tcactgcccaagatgagaatgcgaattcaagtgga

SEQ ID NO: 14126 - DNA, 37 bp, Artificial Sequence
  Synthetic oligonucleotide
tcagccgcagaaacgaacaaccagtctgaggcactga

SEQ ID NO: 14127 - DNA, 35 bp, Artificial Sequence
  Synthetic oligonucleotide
tccaccgcacactcaacagcctgaccgttacgcgg

SEQ ID NO: 14128 - DNA, 35 bp, Artificial Sequence
  Synthetic oligonucleotide
tcccagtgcaggaagccgccgacacgtattcgatg

SEQ ID NO: 14129 - DNA, 38 bp, Artificial Sequence
  Synthetic oligonucleotide
tccgaacatcggtgcaacggatattagtcgtaggatga

SEQ ID NO: 14130 - DNA, 35 bp, Artificial Sequence
  Synthetic oligonucleotide
tccgaaccccatcatgcatcgatgttccagtcgac

SEQ ID NO: 14131 - DNA, 38 bp, Artificial Sequence
  Synthetic oligonucleotide
tcgcggtccgtccttagtctaaggtatgtccaacttga

SEQ ID NO: 14132 - DNA, 38 bp, Artificial Sequence
  Synthetic oligonucleotide
tctacacgcacagtatgcgataaaactgtctagagtga

SEQ ID NO: 14133 - DNA, 35 bp, Artificial Sequence
  Synthetic oligonucleotide
tgaccacgtcgggcttagcatgaccccaggcacgc

SEQ ID NO: 14134 - DNA, 35 bp, Artificial Sequence
  Synthetic oligonucleotide
tgaccccgacagaaggcgatgaacttgccgtcgtt

SEQ ID NO: 14135 - DNA, 38 bp, Artificial Sequence
  Synthetic oligonucleotide
tgacggagcaccaacggatgcgaacgtatcagggttga

SEQ ID NO: 14136 - DNA, 36 bp, Artificial Sequence
  Synthetic oligonucleotide
tgactccgcaaactgaatagctcaggtgcactggta

SEQ ID NO: 14137 - DNA, 37 bp, Artificial Sequence
  Synthetic oligonucleotide
tgcggatgggtcggagggggtggggacggaggctgga

SEQ ID NO: 14138 - DNA, 36 bp, Artificial Sequence
  Synthetic oligonucleotide
tgtacccacaccagccattatgatagtagcccttca

SEQ ID NO: 14139 - DNA, 35 bp, Artificial Sequence
  Synthetic oligonucleotide
tgtaggacgggcgatatggtggtggtggggtggtc

SEQ ID NO: 14140 - DNA, 35 bp, Artificial Sequence
  Synthetic oligonucleotide
ttagccacagaggaacgtcattgctgactttggaa

SEQ ID NO: 14141 - DNA, 36 bp, Artificial Sequence
  Synthetic oligonucleotide
ttcgcacccggacggataagacggctctcgcgcaca

SEQ ID NO: 14142 - DNA, 37 bp, Artificial Sequence
  Synthetic oligonucleotide
ttgacgcaggtccgggtgggcgggtatagaagggtga

SEQ ID NO: 14143 - DNA, 36 bp, Artificial Sequence
  Synthetic oligonucleotide
ttgcgaacaatcaggtcggactgtacgcacaggtta

SEQ ID NO: 14144 - DNA, 37 bp, Artificial Sequence
  Synthetic oligonucleotide
aacaccgcaactaggtagtcagagcaacttaattcga

SEQ ID NO: 14145 - DNA, 35 bp, Artificial Sequence
  Synthetic oligonucleotide
aaccccgacagccgcacttactaggcactctgacc

SEQ ID NO: 14146 - DNA, 38 bp, Artificial Sequence
  Synthetic oligonucleotide
aacgggggggccggtacgtgtactcagggcgagggtga

SEQ ID NO: 14147 - DNA, 36 bp, Artificial Sequence
  Synthetic oligonucleotide
acaaccgcacgtacggagttcatgttacagttatca

SEQ ID NO: 14148 - DNA, 36 bp, Artificial Sequence
  Synthetic oligonucleotide
acacacgagctagatgtatgactagtgcttggcgaa

SEQ ID NO: 14149 - DNA, 36 bp, Artificial Sequence
  Synthetic oligonucleotide
acacagccacgatcactcagcacaggcgatgcaaca

SEQ ID NO: 14150 - DNA, 38 bp, Artificial Sequence
  Synthetic oligonucleotide
acacagtcaactaggcctgcactgacactgttcggtga

SEQ ID NO: 14151 - DNA, 35 bp, Artificial Sequence
  Synthetic oligonucleotide
aattggccactgaccccggcgtagattgggctaca

SEQ ID NO: 14152 - DNA, 35 bp, Artificial Sequence
  Synthetic oligonucleotide
gcgctggttcagtaaaactgtcatgactgtcccta

SEQ ID NO: 14153 - DNA, 35 bp, Artificial Sequence
  Synthetic oligonucleotide
tagagcaatgatgcgactgaccccgaattcctgcc

SEQ ID NO: 14154 - DNA, 35 bp, Artificial Sequence
  Synthetic oligonucleotide
tgacaggtgacgtcccaacgccacttcggcactca

SEQ ID NO: 14155 - DNA, 35 bp, Artificial Sequence
  Synthetic oligonucleotide
tgcatcgcctgaccccgaacagcttgttacctacc

SEQ ID NO: 14156 - DNA, 35 bp, Artificial Sequence
  Synthetic oligonucleotide
tgcccccaggccggagggcgtgtcagtggctcagt

What is claimed is:

1. An oligonucleotide comprising a sequence according to any one of SEQ ID NOs 4151-14156.

2. An oligonucleotide comprising a sequence according to any sequence in Table 44.

3. An oligonucleotide consisting of a sequence according to any sequence in Table 44.

4. The oligonucleotide of claim 3, further comprising a 5′ region and/or a 3′ region flanking the sequence according to any sequence in Table 44.

5. An oligonucleotide comprising a sequence according to any one of the SEQ ID NOs in any preceding claim and further having a 5′ region with sequence 5′-CTAGCATGACTGCAGTACGT (SEQ ID NO. 131) and/or a 3′ region with sequence 5′-CTGTCTCTTATACACATCTGACGCTGCCGACGA (SEQ ID NO. 132).

6. An oligonucleotide comprising a nucleic acid sequence or a portion thereof that is at least 50, 55, 60, 65, 70, 75, 80, 85, 90, 95, 96, 97, 98, 99 or 100 percent homologous to an oligonucleotide sequence according to any preceding claim.

7. A plurality of oligonucleotides comprising at least 1, 2, 3, 4, 5, 6, 7, 8, 9, 10, 11, 12, 13, 14, 15, 16, 17, 18, 19, 20, 25, 30, 40, 45, 50, 55, 60, 65, 70, 75, 80, 85, 90, 95, 100, 125, 150, 175, 200, 300, 400, 500, 600, 700, 800, 900, 1000, 2000, 3000, 4000, 5000, 6000, 7000, 8000, 9000, or at least 10000 different oligonucleotide sequences according to claim 6.

8. The oligonucleotide or the plurality of oligonucleotides according to any preceding claim, wherein the oligonucleotide or the plurality of oligonucleotides comprises a DNA, RNA, 2′-O-methyl backbone, phosphorothioate backbone, or any combination thereof.

9. The oligonucleotide or the plurality of oligonucleotides according to any preceding claim, wherein the oligonucleotide or the plurality of oligonucleotides comprises at least one of DNA, RNA, PNA, LNA, UNA, and any combination thereof.

10. The oligonucleotide or the plurality of oligonucleotides according to any preceding claim, wherein the oligonucleotide or the plurality of oligonucleotides comprises at least one functional modification selected from the group consisting of biotinylation, a non-naturally occurring nucleotide, a deletion, an insertion, an addition, and a chemical modification.

11. The oligonucleotide or plurality of oligonucleotides according to claim 10, wherein the chemical modification comprises at least one of C18, polyethylene glycol (PEG), PEG4, PEG6, PEG8, PEG12, and an SM(PEG)n crosslinker.

12. The oligonucleotide or plurality of oligonucleotides according to any preceding claim, wherein the oligonucleotide or plurality of oligonucleotides is labeled.

13. The oligonucleotide or plurality of oligonucleotides according to any preceding claim, wherein the oligonucleotide or plurality of oligonucleotides is attached to a nanoparticle, liposome, gold, magnetic label, fluorescent label, light emitting particle, radioactive label, or a combination thereof.

14. A method of enriching an oligonucleotide library comprising a plurality of oligonucleotides, the method comprising:
(a) performing at least one round of positive selection, wherein the positive selection comprises:
(i) contacting at least one sample with the plurality of oligonucleotides, wherein the at least one sample is from a single patient; and
(ii) recovering members of the plurality of oligonucleotides that associated with the at least one sample;
(b) optionally performing at least one round of negative selection, wherein the negative selection comprises:
(i) contacting at least one additional sample with the plurality of oligonucleotides, wherein at least one additional sample is from an additional single patient; and
(ii) recovering members of the plurality of oligonucleotides that did not associate with the at least one additional sample; and
(c) amplifying the members of the plurality of oligonucleotides recovered in at least one or step (a)(ii) and step (b)(ii), thereby enriching the oligonucleotide library.

15. The method of claim 14, wherein the recovered members of the plurality of oligonucleotides in step (a)(ii) are used as the input for the next iteration of step (a)(i).

16. The method of claim 14 or 15, wherein the recovered members of the plurality of oligonucleotides in step (b)(ii) are used as the input for the next iteration of step (a)(i).

17. The method of any one of claims 14-16, wherein the at least one sample is at least 2, 3, 4, 5, 6, 7, 8, 9, 10, 11, 12, 13, 14, 15, 16, 17, 18, 19, 20, 25, 30, 40, 45, 50, 55, 60, 65, 70, 75, 80, 85, 90, 95, or 100 samples.

18. The method of any one of claims 14-17, wherein the at least one additional sample is at least 2, 3, 4, 5, 6, 7, 8, 9, 10, 11, 12, 13, 14, 15, 16, 17, 18, 19, 20, 25, 30, 40, 45, 50, 55, 60, 65, 70, 75, 80, 85, 90, 95, or 100 samples.

19. The method of any one of claims 14-18, wherein the unenriched oligonucleotide library comprises at least 2, 3, 4, 5, 6, 7, 8, 9, 10, 11, 12, 13, 14, 15, 16, 17, 18, 19, 20, 25, 30, 40, 45, 50, 55, 60, 65, 70, 75, 80, 85, 90, 95, 100, 125, 150, 175, 200, 300, 400, 500, 600, 700, 800, 900, 1000, 2000, 3000, 4000, 5000, 6000, 7000, 8000, 9000, 10000, 20000, 30000, 40000, 50000, 60000, 70000, 80000, 90000, 100000, 200000, 300000, 400000, 500000, 10⁶, 10⁷, 10⁸, 10⁹, 10¹⁰, 10¹¹, 10¹², 10¹³, 10¹⁴, 10¹⁵, 10¹⁶, 10¹⁷, or at least 10¹⁸ different oligonucleotide sequences.

20. The method of any one of claims 14-19, wherein the unenriched oligonucleotide library comprises a naïve F-Trin library.

21. The method of any one of claims 14-20, wherein the at least one sample is from a same single patient in multiple iterations of positive selection.

22. The method of any one of claims 14-20, wherein the at least one sample is from a same single patient in at least one repetition of positive selection and is from a different single patient in at least one other iteration of positive selection.

23. The method of any one of claims 14-22, wherein the at least one additional sample is from a same additional single patient in multiple iterations of negative selection.

24. The method of any one of claims 14-22, wherein the at least one additional sample is from a same additional single patient in at least one repetition of negative selection and is from a different additional single patient in other at least one iteration of negative selection.

25. A method of characterizing a phenotype in a sample comprising:
(a) contacting the sample with at least one oligonucleotide or plurality of oligonucleotides according to any preceding claim; and
(b) identifying a presence or level of a complex formed between the at least one oligonucleotide or plurality of oligonucleotides and the sample, wherein the presence or level is used to characterize the phenotype.

26. The method of claim 25, wherein the identifying comprises sequencing, amplification, hybridization, gel electrophoresis or chromatography.

27. The method of claim 26, wherein the identifying by hybridization comprises contacting the sample with at least one labeled probe that is configured to hybridize with at least one oligonucleotide.

28. The method of claim 27, wherein the at least one labeled probe is directly or indirectly attached to a label.

29. The method of claim 28, wherein the label comprises a fluorescent or magnetic label.

30. The method of claim 26, wherein the sequencing comprises next generation sequencing, dye termination sequencing, and/or pyrosequencing.

31. The method of any one of claims 25-30, wherein the at least one oligonucleotide comprises an oligonucleotide or plurality of oligonucleotides according to any one of claims 1-13.

32. The method of any one of claims 25-31, wherein the at least one oligonucleotide comprises an oligonucleotide or plurality of oligonucleotides from a library enriched according to any one of claims 14-24.

33. The method of any one of claims 25-32, wherein the phenotype comprises a disease or disorder.

34. The method of claim 33, wherein the characterizing comprises a diagnosis, prognosis and/or theranosis for the disease or disorder.

35. The method of claim 34, wherein the theranosis comprises predicting a treatment efficacy or lack thereof, or monitoring a treatment efficacy.

36. The method of any one of claims 25-35, wherein the complex formed between the at least one oligonucleotide or plurality of oligonucleotides and the sample comprises a complex formed between a microvesicle population in the sample and the at least one oligonucleotide or plurality of oligonucleotides.

37. The method of claim 36, wherein the microvesicle population is isolated before or after the contacting using affinity purification, filtration, polymer precipitation, PEG precipitation, F68, ultracentrifugation, a molecular crowding reagent, affinity isolation, affinity selection, or any combination thereof.

38. The method of any one of claims 25-37 wherein the characterizing comprises comparing the presence or level to a reference.

39. The method of claim 38, wherein the reference comprises the presence or level determined in a sample from an individual without a disease or disorder, or from an individual with a different state of a disease or disorder.

40. The method of claim 38 or 39, wherein the comparison to the reference of at least one oligonucleotide comprising at least one sequence according to any one of claims 1-7 indicates that the sample comprises a cancer sample or a non-cancer/normal sample.

41. The method of any one of claims 25-40, wherein the sample comprises a bodily fluid, tissue sample or cell culture.

42. The method of claim 41, wherein the bodily fluid comprises peripheral blood, sera, plasma, ascites, urine, cerebrospinal fluid (CSF), sputum, saliva, bone marrow, synovial fluid, aqueous humor, amniotic fluid, cerumen, breast milk, broncheoalveolar lavage fluid, semen, prostatic fluid, cowper's fluid or pre-ejaculatory fluid, female ejaculate, sweat, fecal matter, hair oil, tears, cyst fluid, pleural and peritoneal fluid, pericardial fluid, lymph, chyme, chyle, bile, interstitial fluid, menses, pus, sebum, vomit, vaginal secretions, mucosal secretion, stool water, pancreatic juice, lavage fluids from sinus cavities, bronchopulmonary aspirates, blastocyl cavity fluid, or umbilical cord blood.

43. The method any one of claims 25-42, wherein the sample is from a subject suspected of having or being predisposed to a disease or disorder.

44. The method of any of claims 31-43, wherein the disease or disorder comprises a cancer, a premalignant condition, an inflammatory disease, an immune disease, an autoimmune disease or disorder, a cardiovascular disease or disorder, neurological disease or disorder, infectious disease or pain.

45. The method of claim 44, wherein the cancer comprises an acute lymphoblastic leukemia; acute myeloid leukemia; adrenocortical carcinoma; AIDS-related cancers; AIDS-related lymphoma; anal cancer; appendix cancer; astrocytomas; atypical teratoid/rhabdoid tumor; basal cell carcinoma; bladder cancer; brain stem glioma; brain tumor (including brain stem glioma, central nervous system atypical teratoid/rhabdoid tumor, central nervous system embryonal tumors, astrocytomas, craniopharyngioma, ependymoblastoma, ependymoma, medulloblastoma, medulloepithelioma, pineal parenchymal tumors of intermediate differentiation, supratentorial primitive neuroectodermal tumors and pineoblastoma); breast cancer; bronchial tumors; Burkitt lymphoma; cancer of unknown primary site; carcinoid tumor; carcinoma of unknown primary site; central nervous system atypical teratoid/rhabdoid tumor; central nervous system embryonal tumors; cervical cancer; childhood cancers; chordoma; chronic lymphocytic leukemia; chronic myelogenous leukemia; chronic myeloproliferative disorders; colon cancer; colorectal cancer; craniopharyngioma; cutaneous T-cell lymphoma; endocrine pancreas islet cell tumors; endometrial cancer; ependymoblastoma; ependymoma; esophageal cancer; esthesioneuroblastoma; Ewing sarcoma; extracranial germ cell tumor; extragonadal germ cell tumor; extrahepatic bile duct cancer; gallbladder cancer; gastric (stomach) cancer; gastrointestinal carcinoid tumor; gastrointestinal stromal cell tumor; gastrointestinal stromal tumor (GIST); gestational trophoblastic tumor; glioma; hairy cell leukemia; head and neck cancer; heart cancer; Hodgkin lymphoma; hypopharyngeal cancer; intraocular melanoma; islet cell tumors; Kaposi sarcoma; kidney cancer; Langerhans cell histiocytosis; laryngeal cancer; lip cancer; liver cancer; lung cancer; malignant fibrous histiocytoma bone cancer; medulloblastoma; medulloepithelioma; melanoma; Merkel cell carcinoma; Merkel cell skin carcinoma; mesothelioma; metastatic squamous neck cancer with occult primary; mouth cancer; multiple endocrine neoplasia syndromes; multiple myeloma; multiple myeloma/plasma cell neoplasm; mycosis fungoides; myelodysplastic syndromes; myeloproliferative neoplasms; nasal cavity cancer; nasopharyngeal cancer; neuroblastoma; Non-Hodgkin lymphoma; nonmelanoma skin cancer; non-small cell lung cancer; oral cancer; oral cavity cancer; oropharyngeal cancer; osteosarcoma; other brain and spinal cord tumors; ovarian cancer; ovarian epithelial cancer; ovarian germ cell tumor; ovarian low malignant potential tumor; pancreatic cancer; papillomatosis; paranasal sinus cancer; parathyroid cancer; pelvic cancer; penile cancer; pharyngeal cancer; pineal parenchymal tumors of intermediate differentiation; pineoblastoma; pituitary tumor; plasma cell neoplasm/multiple myeloma; pleuropulmonary blastoma; primary central nervous system (CNS) lymphoma; primary hepatocellular liver cancer; prostate cancer; rectal cancer; renal cancer; renal cell (kidney) cancer; renal cell cancer; respiratory tract cancer; retinoblastoma; rhabdomyosarcoma; salivary gland cancer; Sézary syndrome; small cell lung cancer; small intestine cancer; soft tissue sarcoma; squamous cell carcinoma; squamous neck cancer; stomach (gastric) cancer; supratentorial primitive neuroectodermal tumors; T-cell lymphoma; testicular cancer; throat cancer; thymic carcinoma; thymoma; thyroid cancer; transitional cell cancer; transitional cell cancer of the renal pelvis and ureter; trophoblastic tumor; ureter cancer; urethral cancer; uterine cancer; uterine sarcoma; vaginal cancer; vulvar cancer; Waldenström macroglobulinemia; or Wilm's tumor.

46. The method of claim 44, wherein the cancer comprises a breast cancer, wherein optionally the breast cancer comprises a lobular, ductal or triple negative breast cancer.

47. The method of claim 44, wherein the cancer comprises a lobular breast cancer.

48. The method of claim 44, wherein the premalignant condition comprises Barrett's Esophagus.

49. The method of claim 44, wherein the autoimmune disease comprises inflammatory bowel disease (IBD), Crohn's disease (CD), ulcerative colitis (UC), pelvic inflammation, vasculitis, psoriasis, diabetes, autoimmune hepatitis, multiple sclerosis, myasthenia gravis, Type I diabetes, rheumatoid arthritis, psoriasis, systemic lupus erythematosis (SLE), Hashimoto's Thyroiditis, Grave's disease, Ankylosing Spondylitis Sjogrens Disease, CREST syndrome, Scleroderma, Rheumatic Disease, organ rejection, Primary Sclerosing Cholangitis, or sepsis.

50. The method of claim 44, wherein the cardiovascular disease comprises atherosclerosis, congestive heart failure, vulnerable plaque, stroke, ischemia, high blood pressure, stenosis, vessel occlusion or a thrombotic event.

51. The method of claim 44, wherein the neurological disease comprises Multiple Sclerosis (MS), Parkinson's Disease (PD), Alzheimer's Disease (AD), schizophrenia, bipolar disorder, depression, autism, Prion Disease, Pick's disease, dementia, Huntington disease (HD), Down's syndrome, cerebrovascular disease, Rasmussen's encephalitis, viral meningitis, neurospsychiatric systemic lupus erythematosus (NPSLE), amyotrophic lateral sclerosis, Creutzfeldt-Jacob disease, Gerstmann-Straussler-Scheinker disease, transmissible spongiform encephalopathy, ischemic reperfusion damage (e.g. stroke), brain trauma, microbial infection, or chronic fatigue syndrome.

52. The method of claim 44, wherein the pain comprises fibromyalgia, chronic neuropathic pain, or peripheral neuropathic pain.

53. The method of claim 44, wherein the infectious disease comprises a bacterial infection, viral infection, yeast infection, Whipple's Disease, Prion Disease, cirrhosis, methicillin-resistant Staphylococcus aureus, HIV, HCV, hepatitis, syphilis, meningitis, malaria, tuberculosis, influenza.

54. A kit comprising a reagent for carrying out the method of any of claims 25-53.

55. Use of a reagent for carrying out the method of any of claims 25-53.

56. The kit of claim 54 or use of claim 55, wherein the reagent comprises an oligonucleotide or a plurality of oligonucleotides according to any one of claims 1-13.

57. A method of imaging at least one cell or tissue, comprising contacting the at least one cell or tissue with at least one oligonucleotide or plurality of oligonucleotides according to any one of claims 1-13, and detecting the at least one oligonucleotide or the plurality of oligonucleotides in contact with at least one cell or tissue.

58. The method of claim 57, wherein the at least one oligonucleotide or the plurality of oligonucleotides is according to claim 12 or 13.

59. The method of claim 57 or 58, wherein the at least one oligonucleotide or the plurality of oligonucleotides is administered to a subject prior to the detecting.

60. The method any one of claims 57-59, wherein the at least one cell or tissue is from a subject suspected of having or being predisposed to a disease or disorder.

61. The method of any one of claims 57-60, wherein the at least one cell or tissue comprises neoplastic, malignant, tumor, hyperplastic, or dysplastic cells.

62. The method of any one of claims 57-60, wherein the at least one cell or tissue comprises lymphoma, leukemia, renal carcinoma, sarcoma, hemangiopericytoma, melanoma, abdominal cancer, gastric cancer, colon cancer, cervical cancer, prostate cancer, pancreatic cancer, breast cancer, or non-small cell lung cancer cells.

63. A pharmaceutical composition comprising a therapeutically effective amount of the at least one oligonucleotide or the plurality of oligonucleotides according to any one of 1-13, or a salt thereof, and a pharmaceutically acceptable carrier, diluent, or both.

64. The pharmaceutical composition of claim 63, wherein the at least one oligonucleotide or the plurality of oligonucleotides is attached to a toxin or chemotherapeutic agent.

65. The pharmaceutical composition of claim 63, wherein the at least one oligonucleotide or the plurality of oligonucleotides is attached to a liposome or nanoparticle.

66. The pharmaceutical composition of claim 65, wherein the liposome or nanoparticle comprises a small molecule, drug, toxin or chemotherapeutic agent.

67. A method of treating or ameliorating a disease or disorder in a subject in need thereof, comprising administering the composition of any of claims 63-66 to the subject.

68. A method of inducing cytotoxicity in a subject, comprising administering the composition of any of claims 63-66 to the subject.

69. A method comprising detecting a transcript or protein in a biological sample from a subject, comparing a presence or level of the transcript to a reference, and administering the composition of any of claims 63-66 to the subject based on the comparison.

70. The method of any one of claims 67-69, wherein the administering comprises at least one of intradermal, intramuscular, intraperitoneal, intravenous, subcutaneous, intranasal, epidural, oral, sublingual, intracerebral, intravaginal, transdermal, rectal, by inhalation, topical administration, or any combination thereof.

71. A nanoparticle conjugated to the at least one oligonucleotide or the plurality of oligonucleotides according to any one of claims 1-13.

72. The nanoparticle of claim 71, wherein the nanoparticle comprises a small molecule, drug, toxin or chemotherapeutic agent.

73. The nanoparticle of claim 71 or claim 72, wherein the nanoparticle is ≤100 nm in diameter.

74. A pharmaceutical composition comprising a therapeutically effective amount of the nanoparticle of claim 71 or claim 72, and a pharmaceutically acceptable carrier, diluent, or both.

75. A method of treating or ameliorating a disease or disorder in a subject in need thereof, comprising administering the pharmaceutical composition of claim 74 to the subject.

76. A method of inducing cytotoxicity in a subject, comprising administering the pharmaceutical composition of claim 74 to the subject.

77. A method comprising detecting a transcript or protein in a biological sample from a subject, comparing a presence or level of the transcript to a reference, and administering the pharmaceutical composition of claim 74 to the subject based on the comparison.

78. The method of any one of claims 75-77, wherein the administering comprises at least one of intradermal, intramuscular, intraperitoneal, intravenous, subcutaneous, intranasal, epidural, oral, sublingual, intracerebral, intravaginal, transdermal, rectal, by inhalation, topical administration, or any combination thereof.

79. A method of characterizing a phenotype in a sample comprising:
(a) detecting at least one microRNA in the sample, wherein the at least one microRNA is listed in Table 45 or Table 46; and
(b) identifying a presence or level of the at least one the sample, wherein the presence or level is used to characterize the phenotype.

80. The method of claim 79, wherein the at least one microRNA comprises at least 1, 2, 3, 4, 5, 6, 7, 8, 9, or 10 microRNA listed in Table 45.

81. The method of claim 79, wherein the at least one microRNA comprises at least 1, 2, 3, 4, 5, 6, 7, 8, 9, or 10 microRNA listed in Table 46.

82. The method of any one of claims 79-81, wherein the identifying comprises sequencing, amplification, hybridization, gel electrophoresis or chromatography.

83. The method of any one of claims 79-82, wherein the at least one microRNA comprises miR-1299.

84. The method of any one of claims 79-83, wherein the at least one microRNA is isolated from a protein complex, wherein optionally the protein complex comprises an Argonaut protein, Ago2 Ago1, Ago3, Ago4, or GW182.

85. The method of claim 84, wherein the protein complex comprises Ago2.

86. The method of any one of claims 79-85, wherein the phenotype comprises a disease or disorder.

87. The method of claim 86, wherein the characterizing comprises a diagnosis, prognosis and/or theranosis for the disease or disorder.

88. The method of claim 87, wherein the theranosis comprises predicting a treatment efficacy or lack thereof, or monitoring a treatment efficacy.

89. The method of any one of claims 79-88, wherein the at least one microRNA is associated with a microvesicle population.

90. The method of claim 89, wherein the microvesicle population is isolated from the sample using affinity purification, filtration, polymer precipitation, PEG precipitation, F68, ultracentrifugation, a molecular crowding reagent, affinity isolation, affinity selection, or any combination thereof.

91. The method of any one of claims 79-90, wherein the characterizing comprises comparing the presence or level to a reference.

92. The method of claim 91, wherein the reference comprises the presence or level determined in a sample from an individual without a disease or disorder, or from an individual with a different state of a disease or disorder.

93. The method of any one of claims 79-92, wherein the sample comprises a bodily fluid, tissue sample or cell culture.

94. The method of claim 93, wherein the bodily fluid comprises peripheral blood, sera, plasma, ascites, urine, cerebrospinal fluid (CSF), sputum, saliva, bone marrow, synovial fluid, aqueous humor, amniotic fluid, cerumen, breast milk, broncheoalveolar lavage fluid, semen, prostatic fluid, cowper's fluid or pre-ejaculatory fluid, female ejaculate, sweat, fecal matter, hair oil, tears, cyst fluid, pleural and peritoneal fluid, pericardial fluid, lymph, chyme, chyle, bile, interstitial fluid, menses, pus, sebum, vomit, vaginal secretions, mucosal secretion, stool water, pancreatic juice, lavage fluids from sinus cavities, bronchopulmonary aspirates, blastocyl cavity fluid, or umbilical cord blood.

95. The method any one of claims 79-94, wherein the sample is from a subject suspected of having or being predisposed to a disease or disorder.

96. The method of any of claims 33-34, 43-44, 60, 67, 75, or 86-95, wherein the disease or disorder comprises a cancer, a premalignant condition, an inflammatory disease, an immune disease, an autoimmune disease or disorder, a cardiovascular disease or disorder, neurological disease or disorder, infectious disease or pain.

97. The method of claim 96, wherein the cancer comprises an acute lymphoblastic leukemia; acute myeloid leukemia; adrenocortical carcinoma; AIDS-related cancers; AIDS-related lymphoma; anal cancer; appendix cancer; astrocytomas; atypical teratoid/rhabdoid tumor; basal cell carcinoma; bladder cancer; brain stem glioma; brain tumor (including brain stem glioma, central nervous system atypical teratoid/rhabdoid tumor, central nervous system embryonal tumors, astrocytomas, craniopharyngioma, ependymoblastoma, ependymoma, medulloblastoma, medulloepithelioma, pineal parenchymal tumors of intermediate differentiation, supratentorial primitive neuroectodermal tumors and pineoblastoma); breast cancer; bronchial tumors; Burkitt lymphoma; cancer of unknown primary site; carcinoid tumor; carcinoma of unknown primary site; central nervous system atypical teratoid/rhabdoid tumor; central nervous system embryonal tumors; cervical cancer; childhood cancers; chordoma; chronic lymphocytic leukemia; chronic myelogenous leukemia; chronic myeloproliferative disorders; colon cancer; colorectal cancer; craniopharyngioma; cutaneous T-cell lymphoma; endocrine pancreas islet cell tumors; endometrial cancer; ependymoblastoma; ependymoma; esophageal cancer; esthesioneuroblastoma; Ewing sarcoma; extracranial germ cell tumor; extragonadal germ cell tumor; extrahepatic bile duct cancer; gallbladder cancer; gastric (stomach) cancer; gastrointestinal carcinoid tumor; gastrointestinal stromal cell tumor; gastrointestinal stromal tumor (GIST); gestational trophoblastic tumor; glioma; hairy cell leukemia; head and neck cancer; heart cancer; Hodgkin lymphoma; hypopharyngeal cancer; intraocular melanoma; islet cell tumors; Kaposi sarcoma; kidney cancer; Langerhans cell histiocytosis; laryngeal cancer; lip cancer; liver cancer; lung cancer; malignant fibrous histiocytoma bone cancer; medulloblastoma; medulloepithelioma; melanoma; Merkel cell carcinoma; Merkel cell skin carcinoma; mesothelioma; metastatic squamous neck cancer with occult primary; mouth cancer; multiple endocrine neoplasia syndromes; multiple myeloma; multiple myeloma/plasma cell neoplasm; mycosis fungoides; myelodysplastic syndromes; myeloproliferative neoplasms; nasal cavity cancer; nasopharyngeal cancer; neuroblastoma; Non-Hodgkin lymphoma; nonmelanoma skin cancer; non-small cell lung cancer; oral cancer; oral cavity cancer; oropharyngeal cancer; osteosarcoma; other brain and spinal cord tumors; ovarian cancer; ovarian epithelial cancer; ovarian germ cell tumor; ovarian low malignant potential tumor; pancreatic cancer; papillomatosis; paranasal sinus cancer; parathyroid cancer; pelvic cancer; penile cancer; pharyngeal cancer; pineal parenchymal tumors of intermediate differentiation; pineoblastoma; pituitary tumor; plasma cell neoplasm/multiple myeloma; pleuropulmonary blastoma; primary central nervous system (CNS) lymphoma; primary hepatocellular liver cancer; prostate cancer; rectal cancer; renal cancer; renal cell (kidney) cancer; renal cell cancer; respiratory tract cancer; retinoblastoma; rhabdomyosarcoma; salivary gland cancer; Sézary syndrome; small cell lung cancer; small intestine cancer; soft tissue sarcoma; squamous cell carcinoma; squamous neck cancer; stomach (gastric) cancer; supratentorial primitive neuroectodermal tumors; T-cell lymphoma; testicular cancer; throat cancer; thymic carcinoma; thymoma; thyroid cancer; transitional cell cancer; transitional cell cancer of the renal pelvis and ureter; trophoblastic tumor; ureter cancer; urethral cancer; uterine cancer; uterine sarcoma; vaginal cancer; vulvar cancer; Waldenström macroglobulinemia; or Wilm's tumor.

98. The method of claim 96, wherein the cancer comprises a breast cancer, wherein optionally the breast cancer comprises a lobular, ductal or triple negative breast cancer.

99. The method of claim 96, wherein the cancer comprises a lobular breast cancer.

100. The method of claim 96, wherein the cancer comprises prostate cancer.

101. The method of claim 96, wherein the premalignant condition comprises Barrett's Esophagus.

102. The method of claim 96, wherein the autoimmune disease comprises inflammatory bowel disease (IBD), Crohn's disease (CD), ulcerative colitis (UC), pelvic inflammation, vasculitis, psoriasis, diabetes, autoimmune hepatitis, multiple sclerosis, myasthenia gravis, Type I diabetes, rheumatoid arthritis, psoriasis, systemic lupus erythematosis (SLE), Hashimoto's Thyroiditis, Grave's disease, Ankylosing Spondylitis Sjogrens Disease, CREST syndrome, Scleroderma, Rheumatic Disease, organ rejection, Primary Sclerosing Cholangitis, or sepsis.

103. The method of claim 96, wherein the cardiovascular disease comprises atherosclerosis, congestive heart failure, vulnerable plaque, stroke, ischemia, high blood pressure, stenosis, vessel occlusion or a thrombotic event.

104. The method of claim 96, wherein the neurological disease comprises Multiple Sclerosis (MS), Parkinson's Disease (PD), Alzheimer's Disease (AD), schizophrenia, bipolar disorder, depression, autism, Prion Disease, Pick's disease, dementia, Huntington disease (HD), Down's syndrome, cerebrovascular disease, Rasmussen's encephalitis, viral meningitis, neurospsychiatric systemic lupus erythematosus (NPSLE), amyotrophic lateral sclerosis, Creutzfeldt-Jacob disease, Gerstmann-Straussler-Scheinker disease, transmissible spongiform encephalopathy, ischemic reperfusion damage (e.g. stroke), brain trauma, microbial infection, or chronic fatigue syndrome.

105. The method of claim 96, wherein the pain comprises fibromyalgia, chronic neuropathic pain, or peripheral neuropathic pain.

106. The method of claim 96, wherein the infectious disease comprises a bacterial infection, viral infection, yeast infection, Whipple's Disease, Prion Disease, cirrhosis, methicillin-resistant Staphylococcus aureus, HIV, HCV, hepatitis, syphilis, meningitis, malaria, tuberculosis, influenza.

107. A kit comprising a reagent for carrying out the method of any of claims 79-106.

108. Use of a reagent for carrying out the method of any of claims 79-106.

109. The kit of claim 107 or use of claim 108, wherein the reagent comprises at least one of a primer configured to amplify a small RNA, a binding agent to Ago2, a reagent for isolating microvesicles, and any any useful combination thereof.
